(19) United States
(12) Patent Application Publication
(10) Pub. No.: US 2019/0093128 A1
(43) Pub. Date: Mar. 28, 2019

(54) METHODS FOR GENOME EDITING IN ZYGOTES

(71) Applicant: The Regents of the University of California, Oakland, CA (US)

(72) Inventors: Sean Chen, Berkeley, CA (US); Andrew J. Modzelewski, Berkeley, CA (US); Lin He, Berkeley, CA (US); Angus Lee, Berkeley, CA (US)

(21) Appl. No.: 16/084,158

(22) PCT Filed: Mar. 30, 2017
(86) PCT No.: PCT/US17/25039

§ 371 Date: Sep. 11, 2018

Related U.S. Application Data
(60) Provisional application No. 62/316,289, filed on Mar. 31, 2016.

(51) Int. Cl. C12N 15/873; C12N 9/22; C12N 15/11

(52) U.S. Cl. CPC C12N 15/873; C12N 2310/20; C12N 15/11; C12N 9/22

(57) ABSTRACT

The present disclosure provides methods of modifying the genome of a mammalian zygote. The present disclosure provides methods of modulating transcription in a mammalian zygote. The present disclosure provides methods of labeling a target nucleic acid in the genome of a mammalian zygote. The present disclosure provides methods of delivering a ribonucleoprotein complex into a mammalian zygote. The present disclosure provides methods of delivering a polypeptide or a nucleic acid into a mammalian zygote.

### CROSS-REFERENCE

[0001] This application claims the benefit of U.S. Provisional Patent Application No. 62/316,289, filed Mar. 31, 2016, which application is incorporated herein by reference in its entirety.

### STATEMENT REGARDING FEDERALLY SPONSORED RESEARCH

[0002] This invention was made with government support under Grant No. CA192636 awarded by the National Institutes of Health. The government has certain rights in the invention.

### INCORPORATION BY REFERENCE OF SEQUENCE LISTING PROVIDED AS A TEXT FILE

[0003] A Sequence Listing is provided herewith as a text file, “BERK-324PRV_SeqList_ST25.txt” created on Mar. 6, 2016 and having a size of 7,914 KB. The contents of the text file are incorporated by reference herein in their entirety.

### INTRODUCTION

[0004] Easily accessible and efficient methodologies to edit the genomes of organisms are an immense resource to the biological and biomedical research community. Traditionally, engineering of the mammalian genome is achieved by homologous recombination (HR)-mediated sequence substitution in embryonic stem cells (ESCs), a time consuming process that occurs at low frequency. Taking genetically engineering in mice for example, after extensive screening for ESC colonies with the desired genetic modifications, ESCs are microinjected into mouse blastocysts to generate chimeras capable of germline transmission. Such chimera mice are then crossed to wild-type mice to generate heterozygous offspring (F1), which are then intercrossed to yield homozygous mutant mice (F2) that can be subjected to phenotypic analyses. Despite the wide use of this technology to generate transgenic mice, the low efficiency of HR in ESCs, the laborious process of screening, the technical difficulty of microinjection, and the nature of the mouse life cycle make this approach a lengthy and costly process.

### SUMMARY

[0005] The present disclosure provides methods of modifying the genome of a mammalian zygote. The present disclosure provides methods of modulating transcription in a mammalian zygote. The present disclosure provides methods of labeling a target nucleic acid in the genome of a mammalian zygote. The present disclosure provides methods of delivering a ribonucleoprotein complex into a mammalian zygote. The present disclosure provides methods of delivering a polypeptide or a nucleic acid into a mammalian zygote.

[0006] The present disclosure provides a method of modifying genomic DNA of a mammalian zygote, the method comprising introducing into the zygote a ribonucleoprotein (RNP) comprising a class 2 CRISPR/Cas endonuclease complexed with a corresponding CRISPR/Cas guide RNA that hybridizes to a target sequence within the genomic DNA of the zygote, wherein said introducing is by electroporation of an electroporation composition comprising the RNP and the zygote, and wherein said introducing results in modification of the genomic DNA. In some cases, the class 2 CRISPR/Cas endonuclease is a type II CRISPR/Cas endonuclease. In some cases, the class 2 CRISPR/Cas endonuclease is a Cas9 polypeptide and the corresponding CRISPR/Cas guide RNA is a Cas9 guide RNA. In some cases, the Cas9 guide RNA is a single guide RNA (sgRNA). In some cases, the RNP comprises two or more CRISPR/Cas guide RNAs. In some cases, the class 2 CRISPR/Cas endonuclease is a type V or type VI CRISPR/Cas endonuclease. In some cases, the class 2 CRISPR/Cas polypeptide is a Cpf1 polypeptide, a C2c1 polypeptide, a C2c3 polypeptide, or a C2c2 polypeptide. In some cases, modification of the genomic DNA is homozygous modification. In some cases, modification of the genomic DNA is heterozygous modification. In some cases, the modification comprises deletion of genomic DNA, insertion of a nucleic acid into the genomic DNA, or both deletion of genomic DNA and insertion of a nucleic acid into the genomic DNA. In some cases, the modification comprises inversion of genomic DNA. In some cases, the modification comprises insertion of a nucleic acid into genomic DNA. In some cases, the modification comprises replacement of genomic DNA. In some cases, the method comprises introducing into the zygote a donor DNA. In some cases, the zygote is a rodent zygote. In some cases, the zygote is a mouse zygote or a rat zygote. In some cases, the zygote is a rabbit zygote, a cat zygote, a dog zygote, or a horse zygote. In some cases, the zygote is an ungulate zygote. In some cases, the zygote is a human zygote. In some cases, the zygote is a non-human primate zygote. In some cases, the zygote is a non-human mammalian zygote. In some cases, the electroporation comprises: a) combining, in an electroporation container (e.g., an electroporation cuvette) a zygote or a plurality of zygotes (e.g., from 1 zygote to 150 zygotes; e.g., from 1 zygote to 5 zygotes, from 10 zygotes to 15 zygotes, from 15 zygotes to 20 zygotes, from 20 zygotes to 25 zygotes, from 25 zygotes to 30 zygotes, from 30 zygotes to 35 zygotes, from 35 zygotes to 40 zygotes, from 40 zygotes to 45 zygotes, from 45 zygotes to 50 zygotes, from 50 zygotes to 75 zygotes, from 75 zygotes to 100 zygotes, from 100 zygotes to 120 zygotes, from 120 zygotes to 140 zygotes, or from 140 zygotes to 150 zygotes) in a suitable liquid medium with an equal volume of an RNP complex, forming a zygote/RNP complex composition (an “electroporation composition”); and b) electroporating the zygote/RNP complex composition with: i) one or more pulses of 1 millisecond to 6 milliseconds in duration; ii) one or more pulses of 1 millisecond to 6 milliseconds in duration, where each pulse is 30 V; iii) a single pulse at 30 V, where the pulse is a 3-millisecond (msec) pulse; or iv) 6 pulses of 30 V each, where each pulse is 3 milliseconds in duration. In some cases, the RNP is present in the electroporation composition at a concentration of from 5 μM to 16 μM. In some cases, the RNP is present in the electroporation composition at a concentration of 8 μM. In some cases, at least 50%, at least 60%, at least 70%, at least 80%, at least 85%, at least 90%, at least 95%, or at least 98%, of the zygotes are viable after electroporation with the RNP. In some cases, the genomic modification occurs via homology-directed repair (HDR) or non-homologous end joining (NHEJ). In some cases, the genomic modification occurs via HDR, and wherein the efficiency of HDR is at least 50%, at least 60%, at least 70%, at least 80%, at least 90%, or 100%. In some cases, the genomic modification occurs via NHEJ, and wherein the efficiency of NHEJ is at least 50%, at least 60%, at least 70%, at least 80%, at least 90%, or 100%.

[0007] The present disclosure provides a method of modulating transcription in a mammalian zygote, the method comprising introducing into the zygote a ribonucleoprotein (RNP) comprising an enzymatically inactive CRISPR/Cas9 polypeptide complexed with a CRISPR/Cas guide RNA that hybridizes to a target sequence within the genomic DNA of the zygote, wherein said introducing is by electroporation of an electroporation composition comprising the RNP and the zygote, and wherein said introducing results in modulation of transcription of a gene comprising the target sequence. In some cases, the zygote is a rodent zygote. In some cases, the zygote is a mouse zygote or a rat zygote. In some cases, the zygote is a rabbit zygote, a cat zygote, a dog zygote, or a horse zygote. In some cases, the zygote is an ungulate zygote. In some cases, the zygote is a human zygote. In some cases, the zygote is a non-human primate zygote. In some cases, wherein the electroporation comprises: a) combining, in an electroporation container (e.g., an electroporation cuvette) a zygote or a plurality of zygotes (e.g., from 1 zygote to 150 zygotes; e.g., from 1 zygote to 5 zygotes, from 10 zygotes to 15 zygotes, from 15 zygotes to 20 zygotes, from 20 zygotes to 25 zygotes, from 25 zygotes to 30 zygotes, from 30 zygotes to 35 zygotes, from 35 zygotes to 40 zygotes, from 40 zygotes to 45 zygotes, from 45 zygotes to 50 zygotes, from 50 zygotes to 75 zygotes, from 75 zygotes to 100 zygotes, from 100 zygotes to 120 zygotes, from 120 zygotes to 140 zygotes, or from 140 zygotes to 150 zygotes) in a suitable liquid medium with an equal volume of an RNP complex, forming a zygote/RNP complex composition (an “electroporation composition”); and b) electroporating the zygote/RNP complex composition with: i) one or more pulses of 1 millisecond to 6 milliseconds in duration; ii) one or more pulses of 1 millisecond to 6 milliseconds in duration, where each pulse is 30 V; iii) a single pulse at 30 V, where the pulse is a 3-millisecond (msec) pulse; or iv) 6 pulses of 30 V each, where each pulse is 3 milliseconds in duration. In some cases, the zygote is a non-human primate zygote. In some cases, wherein the electroporation comprises: a) combining, in an electroporation container (e.g., an electroporation cuvette) a zygote or a plurality of zygotes (e.g., from 1 zygote to 150 zygotes; e.g., from 1 zygote to 5 zygotes, from 10 zygotes to 15 zygotes, from 15 zygotes to 20 zygotes, from 20 zygotes to 25 zygotes, from 25 zygotes to 30 zygotes, from 30 zygotes to 35 zygotes, from 35 zygotes to 40 zygotes, from 40 zygotes to 45 zygotes, from 45 zygotes to 50 zygotes, from 50 zygotes to 75 zygotes, from 75 zygotes to 100 zygotes, from 100 zygotes to 120 zygotes, from 120 zygotes to 140 zygotes, or from 140 zygotes to 150 zygotes) in a suitable liquid medium with an equal volume of an RNP complex, forming a zygote/RNP complex composition (an “electroporation composition”); and b) electroporating the zygote/RNP complex composition with one or more pulses of 1 millisecond to 6 milliseconds in duration. In some cases, wherein the electroporation comprises: a) combining, in an electroporation container (e.g., an electroporation cuvette) a zygote or a plurality of zygotes (e.g., from 1 zygote to 150 zygotes; e.g., from 1 zygote to 5 zygotes, from 10 zygotes to 15 zygotes, from 15 zygotes to 20 zygotes, from 20 zygotes to 25 zygotes, from 25 zygotes to 30 zygotes, from 30 zygotes to 35 zygotes, from 35 zygotes to 40 zygotes, from 40 zygotes to 45 zygotes, from 45 zygotes to 50 zygotes, from 50 zygotes to 75 zygotes, from 75 zygotes to 100 zygotes, from 100 zygotes to 120 zygotes, from 120 zygotes to 140 zygotes, or from 140 zygotes to 150 zygotes) in a suitable liquid medium with an equal volume of an RNP complex, forming a zygote/RNP complex composition (an “electroporation composition”); and b) electroporating the zygote/RNP complex composition with one or more 30 V pulses of 1 millisecond to 6 milliseconds in duration. In some cases, electroporating the zygote/RNP complex composition comprises electroporating with one or more pulses (e.g., applying one or more pulses to the zygote(s)/RNP complex composition). In some cases, a method of the present disclosure comprises electroporating a zygote/RNP complex composition with a single pulse. In some cases, a method of the present disclosure comprises electroporating a zygote/RNP complex composition with a single pulse of 1 millisecond to 5 milliseconds in duration. In some cases, a method of the present disclosure comprises electroporating a zygote/RNP complex composition with a single 30 V pulse. In some cases, a method of the present disclosure comprises electroporating a zygote/RNP complex composition with a single 30 V pulse of 1 millisecond to 5 milliseconds in duration. In some cases, a method of the present disclosure comprises electroporating a zygote/RNP complex composition with 2 pulses. In some cases, a method of the present disclosure comprises electroporating a zygote/RNP complex composition with 2 pulses, each pulse 1 millisecond to 5 milliseconds in duration. In some cases, a method of the present disclosure comprises electroporating a zygote/RNP complex composition with 2 pulses at 30 V each. In some cases, a method of the present disclosure comprises electroporating a zygote/RNP complex composition with 2 pulses at 30 V each, where each pulse is 1 millisecond to 5 milliseconds in duration. In some cases, a method of the present disclosure comprises electroporating a zygote/RNP complex composition with 3 pulses. In some cases, a method of the present disclosure comprises electroporating a zygote/RNP complex composition with 3 pulses, each pulse 1 millisecond to 5 milliseconds in duration. In some cases, a method of the present disclosure comprises electroporating a zygote/RNP complex composition with 3 pulses at 30 V each. In some cases, a method of the present disclosure comprises electroporating a zygote/RNP complex composition with 3 pulses at 30 V each, where each pulse is 1 millisecond to 5 milliseconds in duration. In some cases, a method of the present disclosure comprises electroporating a zygote/RNP complex composition with 4 pulses. In some cases, a method of the present disclosure comprises electroporating a zygote/RNP complex composition with 4 pulses, each pulse 1 millisecond to 5 milliseconds in duration. In some cases, a method of the present disclosure comprises electroporating a zygote/RNP complex composition with 4 pulses at 30 V each. In some cases, a method of the present disclosure comprises electroporating a zygote/RNP complex composition with 4 pulses at 30 V each, where each pulse is 1 millisecond to 5 milliseconds in duration. In some cases, a method of the present disclosure comprises electroporating a zygote/RNP complex composition with 5 pulses. In some cases, a method of the present disclosure comprises electroporating a zygote/RNP complex composition with 5 pulses, each pulse 1 millisecond to 5 milliseconds in duration. In some cases, a method of the present disclosure comprises electroporating a zygote/RNP complex composition with 5 pulses at 30 V each. In some cases, a method of the present disclosure comprises electroporating a zygote/RNP complex composition with 5 pulses at 30 V each, where each pulse is 1 millisecond to 5 milliseconds in duration. In some cases, a method of the present disclosure comprises electroporating a zygote/RNP complex composition with 6 pulses. In some cases, a method of the present disclosure comprises electroporating a zygote/RNP complex composition with 6 pulses, each pulse 1 millisecond to 5 milliseconds in duration. In some cases, a method of the present disclosure comprises electroporating a zygote/RNP complex composition with 6 pulses at 30 V each. In some cases, a method of the present disclosure comprises electroporating a zygote/RNP complex composition with 6 pulses at 30 V each, where each pulse is 1 millisecond to 5 milliseconds in duration. In some cases, electroporation comprises electroporating with one or more pulses at 30 V (i.e., 30 V each pulse), where the one or more pulses is a 3-millisecond (msec) pulse. In some cases, the one or more pulses is 6 pulses. In some cases, a method of the present disclosure comprises electroporating a zygote/RNP complex composition with 7 pulses. In some cases, a method of the present disclosure comprises electroporating a zygote/RNP complex composition with 7 pulses, each pulse 1 millisecond to 5 milliseconds in duration. In some cases, a method of the present disclosure comprises electroporating a zygote/RNP complex composition with 7 pulses at 30 V each. In some cases, a method of the present disclosure comprises electroporating a zygote/RNP complex composition with 7 pulses at 30 V each, where each pulse is 1 millisecond to 5 milliseconds in duration. In some cases, a method of the present disclosure comprises electroporating a zygote/RNP complex composition with 8 pulses. In some cases, a method of the present disclosure comprises electroporating a zygote/RNP complex composition with 8 pulses, each pulse 1 millisecond to 5 milliseconds in duration. In some cases, a method of the present disclosure comprises electroporating a zygote/RNP complex composition with 8 pulses at 30 V each. In some cases, a method of the present disclosure comprises electroporating a zygote/RNP complex composition with 8 pulses at 30 V each, where each pulse is 1 millisecond to 5 milliseconds in duration. In some cases, a method of the present disclosure comprises electroporating a zygote/RNP complex composition with 9 pulses. In some cases, a method of the present disclosure comprises electroporating a zygote/RNP complex composition with 9 pulses, each pulse 1 millisecond to 5 milliseconds in duration. In some cases, a method of the present disclosure comprises electroporating a zygote/RNP complex composition with 9 pulses at 30 V each. In some cases, a method of the present disclosure comprises electroporating a zygote/RNP complex composition with 9 pulses at 30 V each, where each pulse is 1 millisecond to 5 milliseconds in duration. In some cases, a method of the present disclosure comprises electroporating a zygote/RNP complex composition with 10 pulses. In some cases, a method of the present disclosure comprises electroporating a zygote/RNP complex composition with 10 pulses, each pulse 1 millisecond to 5 milliseconds in duration. In some cases, a method of the present disclosure comprises electroporating a zygote/RNP complex composition with 10 pulses at 30 V each. In some cases, a method of the present disclosure comprises electroporating a zygote/RNP complex composition with 10 pulses at 30 V each, where each pulse is 1 millisecond to 5 milliseconds in duration.

[0008] The present disclosure provides a method of labelling a genomic DNA in a mammalian zygote, the method comprising introducing into the zygote a ribonucleoprotein (RNP) comprising an enzymatically inactive CRISPR/Cas9 polypeptide complexed with a CRISPR/Cas guide RNA that hybridizes to a target sequence within the genomic DNA of the zygote, wherein said introducing is by electroporation of an electroporation composition comprising the RNP and the zygote, and wherein said introducing results in labelling of the genomic DNA. In some cases, the zygote is a rodent zygote. In some cases, the zygote is a mouse zygote or a rat zygote. In some cases, the zygote is a rabbit zygote, a cat zygote, a dog zygote, or a horse zygote. In some cases, the zygote is an ungulate zygote. In some cases, the zygote is a human zygote. In some cases, the zygote is a non-human primate zygote. In some cases, the zygote is a non-human mammalian zygote. In some cases, the electroporation comprises: a) combining, in an electroporation container (e.g., an electroporation cuvette) a zygote or a plurality of zygotes (e.g., from 1 zygote to 150 zygotes; e.g., from 1 zygote to 5 zygotes, from 10 zygotes to 15 zygotes, from 15 zygotes to 20 zygotes, from 20 zygotes to 25 zygotes, from 25 zygotes to 30 zygotes, from 30 zygotes to 35 zygotes, from 35 zygotes to 40 zygotes, from 40 zygotes to 45 zygotes, from 45 zygotes to 50 zygotes, from 50 zygotes to 75 zygotes, from 75 zygotes to 100 zygotes, from 100 zygotes to 120 zygotes, from 120 zygotes to 140 zygotes, or from 140 zygotes to 150 zygotes) in a suitable liquid medium with an equal volume of an RNP complex, forming a zygote/RNP complex composition (an “electroporation composition”); and b) electroporating the zygote/RNP complex composition with: i) one or more pulses of 1 millisecond to 6 milliseconds in duration; ii) one or more pulses of 1 millisecond to 6 milliseconds in duration, where each pulse is 30 V; iii) a single pulse at 30 V, where the pulse is a 3-millisecond (msec) pulse; or iv) 6 pulses of 30 V each, where each pulse is 3 milliseconds in duration.

[0009] The present disclosure provides a method of delivering a ribonucleoprotein (RNP) complex into a mammalian zygote, the method comprising electroporating a composition comprising the mammalian zygote and the RNP complex, thereby delivering the RNP complex into the zygote. In some cases, the RNP complex comprises an siRNA, an shRNA, a modified RNA, or a DNA nucleic acid.

[0010] The present disclosure provides a method of delivering a nucleic acid into a mammalian zygote, the method comprising electroporating a composition comprising the mammalian zygote and the nucleic acid, thereby delivering the nucleic acid into the zygote.

[0011] The present disclosure provides a method of delivering a polypeptide into a mammalian zygote, the method comprising electroporating a composition comprising the mammalian zygote and the polypeptide, thereby delivering the polypeptide into the zygote.

[0012] In any of the methods described above or elsewhere herein, in some cases, the zygote is a rodent zygote. In any of the methods described above or elsewhere herein, in some cases, the zygote is a mouse zygote or a rat zygote. In any of the methods described above or elsewhere herein, in some cases, the zygote is a rabbit zygote, a cat zygote, a dog zygote, or a horse zygote. In any of the methods described above or elsewhere herein, in some cases, the zygote is an ungulate zygote. In any of the methods described above or elsewhere herein, in some cases, the zygote is a human zygote. In any of the methods described above or elsewhere herein, in some cases, the zygote is a non-human primate zygote. In any of the methods described above or elsewhere herein, in some cases, the zygote is a non-human mammalian zygote. In any of the methods described above or elsewhere herein, in some cases, the electroporation comprises: a) combining, in an electroporation container (e.g., an electroporation cuvette) a zygote or a plurality of zygotes (e.g., from 1 zygote to 150 zygotes; e.g., from 1 zygote to 5 zygotes, from 10 zygotes to 15 zygotes, from 15 zygotes to 20 zygotes, from 20 zygotes to 25 zygotes, from 25 zygotes to 30 zygotes, from 30 zygotes to 35 zygotes, from 35 zygotes to 40 zygotes, from 40 zygotes to 45 zygotes, from 45 zygotes to 50 zygotes, from 50 zygotes to 75 zygotes, from 75 zygotes to 100 zygotes, from 100 zygotes to 120 zygotes, from 120 zygotes to 140 zygotes, or from 140 zygotes to 150 zygotes) in a suitable liquid medium with an equal volume of the RNP complex, the nucleic acid, or the polypeptide, forming an electroporation composition (an “electroporation composition”); and b) electroporating the electroporation composition with i) one or more pulses of 1 millisecond to 6 milliseconds in duration; ii) one or more pulses of 1 millisecond to 6 milliseconds in duration, where each pulse is 30 V; iii) a single pulse at 30 V, where the pulse is a 3-millisecond (msec) pulse; or iv) 6 pulses of 30 V each, where each pulse is 3 milliseconds in duration.

[0013] In any of the methods described above or elsewhere herein, in some cases, at least 50%, at least 60%, at least 70%, at least 80%, at least 85%, at least 90%, at least 95%, or at least 98%, of the zygotes are viable after electroporation.

### BRIEF DESCRIPTION OF THE DRAWINGS

[0014] FIG. 1A-1H depict generation of NHEJ-mediated indel mutations using CRISPR-EZ.

[0015] FIG. 2A-2F depict generation of HDR-mediated point mutations using CRISPR-EZ.

[0016] FIG. 3 provides Table 1.

[0017] FIG. 4 provides Table 2.

[0018] FIGS. 5A and 5B provide Table 3 (FIG. 5A) and Table 4 (FIG. 5B).

[0019] FIG. 6 provides the amino acid sequence of a Staphylococcus aureus Cas9 polypeptide.

[0020] FIG. 7 provides the amino acid sequence of a Streptococcus pyogenes Cas9 polypeptide.

[0021] FIG. 8 provides the amino acid sequence of a high-fidelity (HF) Cas9 polypeptide.

[0022] FIG. 9A-9C depict deletion of a retrotransposon upstream of Cdk2ap1.

[0023] FIG. 10A-10D depict optimization of CRISPR-EZ efficiency, throughput, and robustness to achieve enhanced genome editing efficiency and survival.

[0024] FIG. 11 provides a table showing zygotes treated with CRISPR-EZ and transferred to pseudopregnant recipient females that gave birth to edited mice.

[0025] FIG. 12 provides a table showing zygotes treated with CRISPR-EZ and developed into the morula stage.

### DEFINITIONS

[0026] By “site-directed modifying polypeptide” or “site-directed DNA modifying polypeptide” or “site-directed target nucleic acid modifying polypeptide” or “RNA-binding site-directed polypeptide” or “RNA-binding site-directed modifying polypeptide” or “site-directed polypeptide” it is meant a polypeptide that binds a guide RNA and is targeted to a specific DNA sequence by the guide RNA. A site-directed modifying polypeptide can be class 2 CRISPR/Cas protein (e.g., a type II CRISPR/Cas protein, a type V CRISPR/Cas protein, a type VI CRISPR/Cas protein). An example of a type II CRISPR/Cas protein is a Cas9 protein (“Cas9 polypeptide”). Examples of type V CRISPR/Cas proteins are Cpf1, C2c1, and C2c3. An example of a type II CRISPR/Cas protein is a C2c2 protein. Class 2 CRISPR/Cas proteins (e.g., Cas9, Cpf1, C2c1, C2c2, and C2c3) as described herein are targeted to a specific DNA sequence by the RNA (a guide RNA) to which it is bound. The guide RNA comprises a sequence that is complementary to a target sequence within the target DNA, thus targeting the bound CRISPR/Cas protein to a specific location within the target DNA (the target sequence). For example, a Cpf1 polypeptide as described herein is targeted to a specific DNA sequence by the RNA (a guide RNA) to which it is bound. The guide RNA comprises a sequence that is complementary to a target sequence within the target DNA, thus targeting the bound Cpf1 protein to a specific location within the target DNA (the target sequence).

[0027] “Heterologous,” as used herein, means a nucleotide or polypeptide sequence that is not found in the native nucleic acid or protein, respectively.

[0028] The terms “polynucleotide” and “nucleic acid,” used interchangeably herein, refer to a polymeric form of nucleotides of any length, either ribonucleotides or deoxynucleotides. Thus, this term includes, but is not limited to, single-, double-, or multi-stranded DNA or RNA, genomic DNA, cDNA, DNA-RNA hybrids, or a polymer comprising purine and pyrimidine bases or other natural, chemically or biochemically modified, non-natural, or derivatized nucleotide bases. The terms “polynucleotide” and “nucleic acid” should be understood to include, as applicable to the embodiment being described, single-stranded (such as sense or antisense) and double-stranded polynucleotides.

[0029] The terms “peptide,” “polypeptide,” and “protein” are used interchangeably herein, and refer to a polymeric form of amino acids of any length, which can include coded and non-coded amino acids, chemically or biochemically modified or derivatized amino acids, and polypeptides having modified peptide backbones. The term “polypeptide” includes glycoproteins, lipoproteins, phosphoproteins, immunologically tagged proteins, fusion proteins, and the like.

[0030] The term “naturally-occurring” as used herein as applied to a nucleic acid, a cell, or an organism, refers to a nucleic acid, cell, or organism that is found in nature. For example, a polypeptide or polynucleotide sequence that is present in an organism (including viruses) that can be isolated from a source in nature and which has not been intentionally modified by a human in the laboratory is naturally occurring.

[0031] As used herein the term “isolated” is meant to describe a polynucleotide, a polypeptide, or a cell that is in an environment different from that in which the polynucleotide, the polypeptide, or the cell naturally occurs. An isolated genetically modified host cell may be present in a mixed population of genetically modified host cells.

[0032] As used herein, the term “exogenous nucleic acid” refers to a nucleic acid that is not normally or naturally found in and/or produced by a given cell in nature. As used herein, the term “endogenous nucleic acid” refers to a nucleic acid that is normally found in and/or produced by a given cell in nature. An “endogenous nucleic acid” is also referred to as a “native nucleic acid” or a nucleic acid that is “native” to a given cell.

[0033] “Recombinant,” as used herein, means that a particular nucleic acid (DNA or RNA) is the product of various combinations of cloning, restriction, and/or ligation steps resulting in a construct having a structural coding or non-coding sequence distinguishable from endogenous nucleic acids found in natural systems. Generally, DNA sequences encoding the structural coding sequence can be assembled from cDNA fragments and short oligonucleotide linkers, or from a series of synthetic oligonucleotides, to provide a synthetic nucleic acid which is capable of being expressed from a recombinant transcriptional unit contained in a cell or in a cell-free transcription and translation system. Such sequences can be provided in the form of an open reading frame uninterrupted by internal non-translated sequences, or introns, which are typically present in eukaryotic genes. Genomic DNA comprising the relevant sequences can also be used in the formation of a recombinant gene or transcriptional unit. Sequences of non-translated DNA may be present 5′ or 3′ from the open reading frame, where such sequences do not interfere with manipulation or expression of the coding regions, and may indeed act to modulate production of a desired product by various mechanisms (see “DNA regulatory sequences”, below).

[0034] Thus, e.g., the term “recombinant” polynucleotide or “recombinant” nucleic acid refers to one which is not naturally occurring, e.g., is made by the artificial combination of two otherwise separated segments of sequence through human intervention. This artificial combination is often accomplished by either chemical synthesis means, or by the artificial manipulation of isolated segments of nucleic acids, e.g., by genetic engineering techniques. Such can be done to replace a codon with a redundant codon encoding the same or a conservative amino acid, while typically introducing or removing a sequence recognition site. It can also be performed to join together nucleic acid segments of desired functions to generate a desired combination of functions. This artificial combination is often accomplished by either chemical synthesis means, or by the artificial manipulation of isolated segments of nucleic acids, e.g., by genetic engineering techniques.

[0035] Similarly, the term “recombinant” polypeptide refers to a polypeptide which is not naturally occurring, e.g., is made by the artificial combination of two otherwise separated segments of amino sequence through human intervention. Thus, e.g., a polypeptide that comprises a heterologous amino acid sequence is recombinant.

[0036] By “recombination” it is meant a process of exchange of genetic information between two polynucleotides. As used herein, “homology-directed repair (HDR)” refers to the specialized form DNA repair that takes place, for example, during repair of double-strand breaks in cells. This process requires nucleotide sequence homology, uses a “donor” molecule to template repair of a “target” molecule (i.e., the one that experienced the double-strand break), and leads to the transfer of genetic information from the donor to the target. Homology-directed repair may result in an alteration of the sequence of the target molecule (e.g., insertion, deletion, mutation), if the donor polynucleotide differs from the target molecule and part or all of the sequence of the donor polynucleotide is incorporated into the target DNA. In some embodiments, the donor polynucleotide, a portion of the donor polynucleotide, a copy of the donor polynucleotide, or a portion of a copy of the donor polynucleotide integrates into the target DNA.

[0037] By “non-homologous end joining (NHEJ)” it is meant the repair of double-strand breaks in DNA by direct ligation of the break ends to one another without the need for a homologous template (in contrast to homology-directed repair, which requires a homologous sequence to guide repair). NHEJ often results in the loss (deletion) of nucleotide sequence near the site of the double-strand break.

[0038] By “construct” or “vector” is meant a recombinant nucleic acid, generally recombinant DNA, which has been generated for the purpose of the expression and/or propagation of a specific nucleotide sequence(s), or is to be used in the construction of other recombinant nucleotide sequences.

[0039] The terms “DNA regulatory sequences,” “control elements,” and “regulatory elements,” used interchangeably herein, refer to transcriptional and translational control sequences, such as promoters, enhancers, polyadenylation signals, terminators, protein degradation signals, and the like, that provide for and/or regulate expression of a coding sequence and/or production of an encoded polypeptide in a host cell.

[0040] The term “transformation” is used interchangeably herein with “genetic modification” and refers to a permanent or transient genetic change induced in a cell following introduction of new nucleic acid (i.e., DNA exogenous to the cell). Genetic change (“modification”) can be accomplished either by incorporation of the new DNA into the genome of the host cell, or by transient or stable maintenance of the new DNA as an episomal element. Where the cell is a eukaryotic cell, a permanent genetic change is generally achieved by introduction of the DNA into the genome of the cell.

[0041] “Operably linked” refers to a juxtaposition wherein the components so described are in a relationship permitting them to function in their intended manner. For instance, a promoter is operably linked to a coding sequence if the promoter affects its transcription or expression. As used herein, the terms “heterologous promoter” and “heterologous control regions” refer to promoters and other control regions that are not normally associated with a particular nucleic acid in nature. For example, a “transcriptional control region heterologous to a coding region” is a transcriptional control region that is not normally associated with the coding region in nature.

[0042] The term “conservative amino acid substitution” refers to the interchangeability in proteins of amino acid residues having similar side chains. For example, a group of amino acids having aliphatic side chains consists of glycine, alanine, valine, leucine, and isoleucine; a group of amino acids having aliphatic-hydroxyl side chains consists of serine and threonine; a group of amino acids having amide-containing side chains consists of asparagine and glutamine; a group of amino acids having aromatic side chains consists of phenylalanine, tyrosine, and tryptophan; a group of amino acids having basic side chains consists of lysine, arginine, and histidine; and a group of amino acids having sulfur-containing side chains consists of cysteine and methionine. Exemplary conservative amino acid substitution groups are: valine-leucine-isoleucine, phenylalanine-tyrosine, lysine-arginine, alanine-valine, and asparagine-glutamine.

[0043] A polynucleotide or polypeptide has a certain percent “sequence identity” to another polynucleotide or polypeptide, meaning that, when aligned, that percentage of bases or amino acids are the same, and in the same relative position, when comparing the two sequences. Sequence similarity can be determined in a number of different manners. To determine sequence identity, sequences can be aligned using the methods and computer programs, including BLAST, available over the world wide web at ncbi.nlm.nih.gov/BLAST. See, e.g., Altschul et al. (1990), J. Mol. Biol. 215:403-10. Another alignment algorithm is FASTA, available in the Genetics Computing Group (GCG) package, from Madison, Wis., USA, a wholly owned subsidiary of Oxford Molecular Group, Inc. Other techniques for alignment are described in Methods in Enzymology, vol. 266: Computer Methods for Macromolecular Sequence Analysis (1996), ed. Doolittle, Academic Press, Inc., a division of Harcourt Brace & Co., San Diego, Calif., USA. Of particular interest are alignment programs that permit gaps in the sequence. The Smith-Waterman is one type of algorithm that permits gaps in sequence alignments. See Meth. Mol. Biol. 70: 173-187 (1997). Also, the GAP program using the Needleman and Wunsch alignment method can be utilized to align sequences. See J. Mol. Biol. 48: 443-453 (1970).

[0044] The term “zygote” is well understood in the art, and refers to a diploid cell resulting from the fusion of two haploid gametes.

[0045] Before the present invention is further described, it is to be understood that this invention is not limited to particular embodiments described, as such may, of course, vary. It is also to be understood that the terminology used herein is for the purpose of describing particular embodiments only, and is not intended to be limiting, since the scope of the present invention will be limited only by the appended claims.

[0046] Where a range of values is provided, it is understood that each intervening value, to the tenth of the unit of the lower limit unless the context clearly dictates otherwise, between the upper and lower limit of that range and any other stated or intervening value in that stated range, is encompassed within the invention. The upper and lower limits of these smaller ranges may independently be included in the smaller ranges, and are also encompassed within the invention, subject to any specifically excluded limit in the stated range. Where the stated range includes one or both of the limits, ranges excluding either or both of those included limits are also included in the invention.

[0047] Unless defined otherwise, all technical and scientific terms used herein have the same meaning as commonly understood by one of ordinary skill in the art to which this invention belongs. Although any methods and materials similar or equivalent to those described herein can also be used in the practice or testing of the present invention, the preferred methods and materials are now described. All publications mentioned herein are incorporated herein by reference to disclose and describe the methods and/or materials in connection with which the publications are cited.

[0048] It must be noted that as used herein and in the appended claims, the singular forms “a,” “an,” and “the” include plural referents unless the context clearly dictates otherwise. Thus, for example, reference to “a CRISPR/Cas endonuclease” includes a plurality of such endonucleases and reference to “the ribonucleoprotein” includes reference to one or more ribonucleoproteins and equivalents thereof known to those skilled in the art, and so forth. It is further noted that the claims may be drafted to exclude any optional element. As such, this statement is intended to serve as antecedent basis for use of such exclusive terminology as “solely,” “only” and the like in connection with the recitation of claim elements, or use of a “negative” limitation.

[0049] It is appreciated that certain features of the invention, which are, for clarity, described in the context of separate embodiments, may also be provided in combination in a single embodiment. Conversely, various features of the invention, which are, for brevity, described in the context of a single embodiment, may also be provided separately or in any suitable sub-combination. All combinations of the embodiments pertaining to the invention are specifically embraced by the present invention and are disclosed herein just as if each and every combination was individually and explicitly disclosed. In addition, all sub-combinations of the various embodiments and elements thereof are also specifically embraced by the present invention and are disclosed herein just as if each and every such sub-combination was individually and explicitly disclosed herein.

[0050] The publications discussed herein are provided solely for their disclosure prior to the filing date of the present application. Nothing herein is to be construed as an admission that the present invention is not entitled to antedate such publication by virtue of prior invention. Further, the dates of publication provided may be different from the actual publication dates which may need to be independently confirmed.

### DETAILED DESCRIPTION

[0051] The present disclosure provides methods of modifying the genome of a mammalian zygote. The present disclosure provides methods of modulating transcription in a mammalian zygote. The present disclosure provides methods of labeling a target nucleic acid in the genome of a mammalian zygote. The present disclosure provides methods of delivering a ribonucleoprotein complex into a mammalian zygote.

Methods of Delivering a Ribonucleoprotein Complex into a Zygote

[0052] The present disclosure provides methods of delivering a ribonucleoprotein (RNP) complex into a mammalian zygote.

[0053] In some cases, the RNP complex comprises an siRNA, a microRNA, an antisense RNA, an shRNA, a modified RNA, an antagomir RNA, or a DNA nucleic acid. In some cases, the RNP complex comprises an RNAi agent (e.g., an siRNA, an shRNA, etc.).

[0054] In some cases, the RNP complex comprises an antisense agent. An antisense agent may be antisense oligonucleotides (ODN), e.g., synthetic ODN having chemical modifications from native nucleic acids, or nucleic acid constructs that express such antisense molecules as RNA. The antisense sequence is complementary to the targeted mRNA, and inhibits its translation into protein. One or a combination of antisense molecules may be used, where a combination may comprise multiple different sequences.

[0055] Antisense molecules may be produced by expression of all or a part of a target nucleotide sequence in an appropriate vector, where the transcriptional initiation is oriented such that an antisense strand is produced as an RNA molecule. Alternatively, the antisense molecule may be a synthetic oligonucleotide. Antisense oligonucleotides will generally be at least about 7, e.g., at least about 12, at least about 20 nucleotides in length, or not more than about 25, e.g., not more than about 23-22 nucleotides in length, where the length is governed by efficiency of inhibition, specificity, including absence of cross-reactivity, and the like.

[0056] Antisense oligonucleotides may be chemically synthesized by methods known in the art. In some cases, oligonucleotides are chemically modified from the native phosphodiester structure, in order to increase their intracellular stability and binding affinity. A number of modifications that alter the chemistry of the backbone, sugars or heterocyclic bases have been described in the literature, any of which may be included in the antisense agent. Among useful changes in the backbone chemistry are phosphorothioates; phosphorodithioates, where both of the non-bridging oxygens are substituted with sulfur; phosphoroamidites; alkyl phosphotriesters and boranophosphates. Achiral phosphate derivatives include 3′-O′-5′-S-phosphorothioate, 3′-S-5′-O-phosphorothioate, 3′-CH₂-5′-O-phosphonate and 3′-NH-5′-O-phosphoroamidate. Peptide nucleic acids replace the entire ribose phosphodiester backbone with a peptide linkage. Sugar modifications are also used to enhance stability and affinity. The α-anomer of deoxyribose may be used, where the base is inverted with respect to the natural β-anomer. The 2′-OH of the ribose sugar may be altered to form 2′-O-methyl or 2′-O-allyl sugars, which provides resistance to degradation without comprising affinity. Modification of the heterocyclic bases must maintain proper base pairing. Some useful substitutions include deoxyuridine for deoxythymidine; 5-methyl-2′-deoxycytidine and 5-bromo-2′-deoxycytidine for deoxycytidine. 5-propynyl-2′-deoxyuridine and 5-propynyl-2′-deoxycytidine have been shown to increase affinity and biological activity when substituted for deoxythymidine and deoxycytidine, respectively.

[0057] In some cases, the RNP complex comprises an RNAi agent. By RNAi agent is meant an agent that modulates expression of a gene by an RNA interference mechanism.

[0058] The RNAi agents are small ribonucleic acid molecules (also referred to herein as interfering ribonucleic acids), i.e., oligoribonucleotides, that are present in duplex structures, e.g., two distinct oligoribonucleotides hybridized to each other or a single ribooligonucleotide that assumes a small hairpin formation to produce a duplex structure. By oligoribonucleotide is meant a ribonucleic acid that does not exceed about 100 nt in length, and typically does not exceed about 75 nt length, where the length in certain embodiments is less than about 70 nt. In certain embodiments, the oligoribonucleotide is less than 100, 95, 90, 85, 80, 75, 70, 65, 60, 55, 50, 45 or 40 nt in length. In certain embodiments, the oligoribonucleotide is less than 100 nt in length. In other embodiments, the oligoribonucleotide is less than 95 nt in length. In another embodiment, the oligoribonucleotide is less than 90 nt in length. In another embodiment, the oligoribonucleotide is less than 85 nt in length. In some embodiments, the oligoribonucleotide is less than 80 nt in length. In other embodiments, the oligoribonucleotide is less than 75 nt in length. In other embodiments, the oligoribonucleotide is less than 70 nt in length. In other embodiments, the oligoribonucleotide is less than 65 nt in length. In yet other embodiments, the oligoribonucleotide is less than 60 nt in length. In other embodiments, the oligoribonucleotide is less than 55 nt in length. In certain embodiments, the oligoribonucleotide is less than 50 nt in length. In other embodiments, the oligoribonucleotide is less than 45 nt in length. In yet other embodiments, the oligoribonucleotide is less than 40 nt in length. In specific embodiments, the oligoribonucleotide is 100, 99, 98, 97, 96, 95, 94, 93, 92, 91, 90, 89, 88, 87, 86, 85, 84, 83, 82, 81, 80, 79, 78, 77, 76, 75, 74, 73, 72, 71, 70, 69, 68, 67, 66, 65, 64, 63, 62, 61, 60, 59, 58, 57, 56, 55, 54, 53, 52, 51, 50, 49, 48, 47, 46, 45, 44, 43, 42, 41 or 40 nt in length.

[0059] Where the RNA agent is a duplex structure of two distinct ribonucleic acids hybridized to each other, e.g., an siRNA, the length of the duplex structure typically ranges from about 15 to 30 bp, e.g., from about 15 to 29 bp, where lengths between about 20 and 29 bps, e.g., 21 bp, 22 bp, can be used. In certain cases, the RNA agent is 30, 29, 28, 27, 26, 25, 24, 23, 22, 21, 20, 19, 18, 17, 16, 15, 14, 13, 12, 11 or 10 bp in length.

[0060] In some cases, the RNP complex comprises a DNA-binding polypeptide. In some cases, the RNP complex comprises a TALE nuclease (a “TALEN”), a zinc-finger endonuclease, or an RNA-guided endonuclease. In some cases, the RNA-guided endonuclease is a CRISPR/Cas endonuclease, as described below.

[0061] In some cases, the RNP complex comprises: i) a CRISPR/Cas endonuclease; and ii) only one guide RNA. In some cases, the RNP complex comprises: i) a CRISPR/Cas endonuclease; and ii) two guide RNAs. In some cases, the RNP complex comprises: i) a CRISPR/Cas endonuclease; and ii) more than two guide RNAs. In some cases, the guide RNA is a dual-guide RNA (e.g., a dual-molecule guide RNA). In some cases, the guide RNA is a single-guide RNA (e.g., a single-molecule guide RNA).

[0062] A method of the present disclosure involves electroporating an RNP complex into a zygote. In some cases, a method of the present disclosure comprises: a) combining, in an electroporation container (e.g., an electroporation cuvette) a zygote or a plurality of zygotes (e.g., from 1 zygote to 150 zygotes; e.g., from 1 zygote to 5 zygotes, from 10 zygotes to 15 zygotes, from 15 zygotes to 20 zygotes, from 20 zygotes to 25 zygotes, from 25 zygotes to 30 zygotes, from 30 zygotes to 35 zygotes, from 35 zygotes to 40 zygotes, from 40 zygotes to 45 zygotes, from 45 zygotes to 50 zygotes, from 50 zygotes to 75 zygotes, from 75 zygotes to 100 zygotes, from 100 zygotes to 120 zygotes, from 120 zygotes to 140 zygotes, or from 140 zygotes to 150 zygotes) in a suitable liquid medium with an equal volume of an RNP complex, forming a zygote/RNP complex composition (an “electroporation mixture” or an “electroporation composition”); and b) electroporating the zygote/RNP complex composition with 2 pulses at 30 V, where each pulse is a 3-millisecond (msec) pulse, with a 1 msec interval between the 2 pulses. In some cases, the RNP is present in the electroporation composition at a concentration of from 5 μM to 16 μM. In some cases, the RNP is present in the electroporation composition at a concentration of 8 μM. In some cases, at least 50%, at least 60%, at least 70%, at least 80%, at least 85%, at least 90%, at least 95%, or at least 98%, of the zygotes are viable after electroporation with the RNP. In some cases, from 50% to 95% of the zygotes are viable after electroporation with the RNP. In some cases, from 60% to 95% of the zygotes are viable after electroporation with the RNP. In some cases, from 70% to 95% of the zygotes are viable after electroporation with the RNP. In some cases, from 80% to 95% of the zygotes are viable after electroporation with the RNP. In some cases, 100% of the zygotes are viable after electroporation with the RNP. In some cases, the genomic modification occurs via homology-directed repair (HDR) or non-homologous end joining (NHEJ). In some cases, the genomic modification occurs via HDR, and wherein the efficiency of HDR is at least 50%, at least 60%, at least 70%, at least 80%, at least 90%, or 100%. In some cases, the genomic modification occurs via NHEJ, and wherein the efficiency of NHEJ is at least 50%, at least 60%, at least 70%, at least 80%, at least 90%, or 100%.

[0063] In some cases, a method of the present disclosure comprises: a) combining, in an electroporation container (e.g., an electroporation cuvette) a zygote or a plurality of zygotes (e.g., from 1 zygote to 150 zygotes; e.g., from 1 zygote to 5 zygotes, from 10 zygotes to 15 zygotes, from 15 zygotes to 20 zygotes, from 20 zygotes to 25 zygotes, from 25 zygotes to 30 zygotes, from 30 zygotes to 35 zygotes, from 35 zygotes to 40 zygotes, from 40 zygotes to 45 zygotes, from 45 zygotes to 50 zygotes, from 50 zygotes to 75 zygotes, from 75 zygotes to 100 zygotes, from 100 zygotes to 120 zygotes, from 120 zygotes to 140 zygotes, or from 140 zygotes to 150 zygotes) in a suitable liquid medium with an equal volume of an RNP complex, forming a zygote/RNP complex composition (an “electroporation mixture” or an “electroporation composition”); and b) electroporating the zygote/RNP complex composition with a single pulse at 30 V, where the single pulse is a 3-msec pulse. In some cases, the RNP is present in the electroporation composition at a concentration of from 5 μM to 16 μM. In some cases, the RNP is present in the electroporation composition at a concentration of 8 μM. In some cases, at least 50%, at least 60%, at least 70%, at least 80%, at least 85%, at least 90%, at least 95%, or at least 98%, of the zygotes are viable after electroporation with the RNP. In some cases, from 50% to 95% of the zygotes are viable after electroporation with the RNP. In some cases, from 60% to 95% of the zygotes are viable after electroporation with the RNP. In some cases, from 70% to 95% of the zygotes are viable after electroporation with the RNP. In some cases, from 80% to 95% of the zygotes are viable after electroporation with the RNP. In some cases, 100% of the zygotes are viable after electroporation with the RNP. In some cases, the genomic modification occurs via homology-directed repair (HDR) or non-homologous end joining (NHEJ). In some cases, the genomic modification occurs via HDR, and wherein the efficiency of HDR is at least 50%, at least 60%, at least 70%, at least 80%, at least 90%, or 100%. In some cases, the genomic modification occurs via NHEJ, and wherein the efficiency of NHEJ is at least 50%, at least 60%, at least 70%, at least 80%, at least 90%, or 100%.

[0064] A method of the present disclosure for delivering an RNP complex into a mammalian zygote can be used to deliver an RNP complex into any of a variety of mammalian zygotes, including, e.g., a human zygote or a non-human mammalian zygote. Non-human mammalian zygotes include, but are not limited to, a rodent zygote (e.g., a rat zygote; a mouse zygote); a lagomorph zygote (e.g., a rabbit zygote); a feline zygote, e.g., a cat zygote; a canine zygote, e.g., a dog zygote; an ovine (e.g., sheep) zygote; a caprine (e.g., goat) zygote; an equine (e.g., horse) zygote; an ungulate zygote; a non-human primate zygote; etc.

[0065] In some cases, electroporation of the zygote/RNP composition includes electroporating with one or more pulses. In some cases, electroporation of the zygote/RNP composition includes electroporating with multiple pulses. In some cases, electroporation of the zygote/RNP composition includes electroporating with 3 pulses. In some cases, electroporation of the zygote/RNP composition includes electroporating with 4 pulses. In some cases, electroporation of the zygote/RNP composition includes electroporating with 5 pulses. In some cases, electroporation of the zygote/RNP composition includes electroporating with 6 pulses. In some cases, electroporation of the zygote/RNP composition includes electroporating with 7 pulses. In some cases, electroporation of the zygote/RNP composition includes electroporating with 8 pulses. In some cases, electroporation of the zygote/RNP composition includes electroporating with 9 pulses. In some cases, electroporation of the zygote/RNP composition includes electroporating with 10 pulses. In some cases, at least 20%, at least 30%, at least 40%, at least 50%, at least 60%, at least 70%, at least 80%, at least 85%, at least 90%, at least 95%, or at least 98%, of the zygotes are viable after electroporation. In some cases, from 20% to 50% of the zygotes are viable after electroporation. In some cases, from 50% to 95% of the zygotes are viable after electroporation. In some cases, from 60% to 95% of the zygotes are viable after electroporation. In some cases, from 70% to 95% of the zygotes are viable after electroporation. In some cases, from 80% to 95% of the zygotes are viable after electroporation. In some cases, 100% of the zygotes are viable after electroporation.

[0066] In some cases, electroporation of the zygote/RNP composition includes electroporating with one or more pulses, where each pulse is a 1-millisecond (msec) pulse. In some cases, electroporation of the zygote/RNP composition includes electroporating with one or more pulses, where each pulse is a 2-millisecond (msec) pulse. In some cases, electroporation of the zygote/RNP composition includes electroporating with one or more pulses, where each pulse is a 3-millisecond (msec) pulse. In some cases, electroporation of the zygote/RNP composition includes electroporating with one or more pulses, where each pulse is a 4-millisecond (msec) pulse. In some cases, electroporation of the zygote/RNP composition includes electroporating with one or more pulses, where each pulse is a 3-millisecond (msec) pulse. In some cases, electroporation of the zygote/RNP composition includes electroporating with one or more pulses, where each pulse is a 5-millisecond (msec) pulse. In some cases, electroporation of the zygote/RNP composition includes electroporating with one or more pulses, where each pulse is a 6-millisecond (msec) pulse. In some cases, electroporation of the zygote/RNP composition includes electroporating with one or more pulses, where each pulse is a 7-millisecond pulse. In some cases, electroporation of the zygote/RNP composition includes electroporating with one or more pulses, where each pulse is an 8-millisecond pulse. In some cases, electroporation of the zygote/RNP composition includes electroporating with one or more pulses, where each pulse is a 9-millisecond pulse. In some cases, electroporation of the zygote/RNP composition includes electroporating with one or more pulses, where each pulse is a 10-millisecond pulse.

[0067] In some cases, electroporation of the zygote/RNP composition includes electroporating with multiple pulses at 10 V. In some cases, electroporation of the zygote/RNP composition includes electroporating with multiple pulses at 15 V. In some cases, electroporation of the zygote/RNP composition includes electroporating with multiple pulses at 20 V. In some cases, electroporation of the zygote/RNP composition includes electroporating with multiple pulses at 25 V. In some cases, electroporation of the zygote/RNP composition includes electroporating with multiple pulses at 30 V. In some cases, electroporation of the zygote/RNP composition includes electroporating with multiple pulses at 35 V. In some cases, electroporation of the zygote/RNP composition includes electroporating with multiple pulses at 40 V. In some cases, electroporation of the zygote/RNP composition includes electroporating with multiple pulses at 45 V. In some cases, electroporation of the zygote/RNP composition includes electroporating with multiple pulses at 50 V. In some cases, electroporation of the zygote/RNP composition includes electroporating with multiple pulses at 55 V. In some cases, electroporation of the zygote/RNP composition includes electroporating with multiple pulses at 60 V.

[0068] In some cases, electroporation of the zygote/RNP composition includes electroporating with 2 pulses at 30 volts, where each pulse is a 3-millisecond (msec) pulse. In some cases, electroporation of the zygote/RNP composition includes electroporating with 4 pulses at 30 volts, where each pulse is a 3-millisecond (msec) pulse. In some cases, electroporation of the zygote/RNP composition includes electroporating with 6 pulses at 30 volts, where each pulse is a 3-millisecond (msec) pulse. In some cases, electroporation of the zygote/RNP composition includes electroporating with 8 pulses at 30 volts, where each pulse is a 3-millisecond (msec) pulse. In some cases, electroporation of the zygote/RNP composition includes electroporating with 10 pulses at 30 volts, where each pulse is a 3-millisecond (msec) pulse. In some cases, electroporation of the zygote/RNP composition includes electroporating with 12 pulses at 30 volts, where each pulse is a 3-millisecond (msec) pulse.

Methods of Delivering a Polypeptide or a Polynucleotide into a Zygote

[0069] The present disclosure provides methods of delivering a nucleic acid into a mammalian zygote. The present disclosure provides methods of delivering a polypeptide into a mammalian zygote.

[0070] A polynucleotide to be delivered into a mammalian zygote using a method of the present disclosure can be single-stranded, double-stranded, or multi-stranded. The polynucleotide to be delivered into a mammalian zygote can be DNA or RNA, genomic DNA, cDNA, DNA-RNA hybrids, or a polymer comprising purine and pyrimidine bases or other natural, chemically or biochemically modified, non-natural, or derivatized nucleotide bases.

[0071] A polynucleotide to be delivered into a mammalian zygote using a method of the present disclosure can comprise a nucleotide sequence that encodes a polypeptide (e.g., a therapeutic polypeptide; a transcription activator; a transcription repressor; etc.). A polynucleotide to be delivered into a mammalian zygote using a method of the present disclosure can comprise a nucleotide sequence that encodes a functional RNA. A polynucleotide to be delivered into a mammalian zygote using a method of the present disclosure can comprise a nucleotide sequence in some cases does not comprises a nucleotide sequence that encodes a polypeptide or a functional RNA. A polynucleotide to be delivered into a mammalian zygote using a method of the present disclosure can be an siRNA, a microRNA, an antisense RNA, an shRNA, a modified RNA, an antagomir RNA, or a DNA nucleic acid; an RNAi agent (e.g., an siRNA, an shRNA, etc.); an antisense RNA; an antisense oligonucleotide (ODN), e.g., a synthetic ODN having chemical modifications from native nucleic acids; a nucleic acid construct that express an antisense molecule as RNA.

[0072] A polypeptide to be delivered into a mammalian zygote using a method of the present disclosure can be any of a variety of polypeptides, including, but not limited to, a therapeutic polypeptide; a transcription activator; a transcription repressor; a polypeptide that modulates development; etc.

[0073] A polypeptide to be delivered into a mammalian zygote using a method of the present disclosure can have a length of from about 10 amino acids to about 10,000 amino acids; e.g., from about 10 amino acids to about 100 amino acids, from 100 amino acids to about 500 amino acids, from about 500 amino acids to about 1,000 amino acids, from about 1,000 amino acids to about 2000 amino acids, from about 2000 amino acids to about 3000 amino acids, from about 3000 amino acids to about 4000 amino acids, from about 4000 amino acids to about 5000 amino acids, from about 5000 amino acids to about 7500 amino acids, or from about 7500 amino acids to about 10,000 amino acids. A polypeptide to be delivered into a mammalian zygote using a method of the present disclosure can be from 0.1 kDa to 1000 kDa, e.g., from about 0.1 kDa to 0.5 kDa, from 0.5 kDa to 1 kDa, from 1 kDa to 10 kDa, from 10 kDa to 50 kDa, from 50 kDa to 100 kDa, from 100 kDa to 200 kDa, from 200 kDa to 300 kDa, from 300 kDa to 400 kDa, from 400 kDa to 500 kDa, from 500 kDa to 750 kDa, from 750 kDa to 1000 kDa, or more than 1000 kDa.

[0074] A method of the present disclosure involves electroporating a polypeptide or a polynucleotide into a zygote. In some cases, a method of the present disclosure comprises: a) combining, in an electroporation container (e.g., an electroporation cuvette) a zygote or a plurality of zygotes (e.g., from 1 zygote to 150 zygotes; e.g., from 1 zygote to 5 zygotes, from 10 zygotes to 15 zygotes, from 15 zygotes to 20 zygotes, from 20 zygotes to 25 zygotes, from 25 zygotes to 30 zygotes, from 30 zygotes to 35 zygotes, from 35 zygotes to 40 zygotes, from 40 zygotes to 45 zygotes, from 45 zygotes to 50 zygotes, from 50 zygotes to 75 zygotes, from 75 zygotes to 100 zygotes, from 100 zygotes to 120 zygotes, from 120 zygotes to 140 zygotes, or from 140 zygotes to 150 zygotes) in a suitable liquid medium with an equal volume of a composition comprising a polynucleotide, forming a zygote/polynucleotide composition (an “electroporation mixture”); and b) electroporating the zygote/polynucleotide composition with 2 pulses at 30 V, where each pulse is a 3-millisecond (msec) pulse, with a 1 msec interval between the 2 pulses. In some cases, at least 50%, at least 60%, at least 70%, at least 80%, at least 85%, at least 90%, at least 95%, or at least 98%, of the zygotes are viable after electroporation.

[0075] A method of the present disclosure involves electroporating a polypeptide or a polynucleotide into a zygote. In some cases, a method of the present disclosure comprises: a) combining, in an electroporation container (e.g., an electroporation cuvette) a zygote or a plurality of zygotes (e.g., from 1 zygote to 150 zygotes; e.g., from 1 zygote to 5 zygotes, from 10 zygotes to 15 zygotes, from 15 zygotes to 20 zygotes, from 20 zygotes to 25 zygotes, from 25 zygotes to 30 zygotes, from 30 zygotes to 35 zygotes, from 35 zygotes to 40 zygotes, from 40 zygotes to 45 zygotes, from 45 zygotes to 50 zygotes, from 50 zygotes to 75 zygotes, from 75 zygotes to 100 zygotes, from 100 zygotes to 120 zygotes, from 120 zygotes to 140 zygotes, or from 140 zygotes to 150 zygotes) in a suitable liquid medium with an equal volume of a composition comprising a polynucleotide, forming a zygote/polynucleotide composition (an “electroporation mixture”); and b) electroporating the zygote/polynucleotide composition with a single pulse at 30 V, where the single pulse is a 3-millisecond (msec) pulse. In some cases, at least 50%, at least 60%, at least 70%, at least 80%, at least 85%, at least 90%, at least 95%, or at least 98%, of the zygotes are viable after electroporation.

[0076] In some cases, a method of the present disclosure comprises: a) combining, in an electroporation container (e.g., an electroporation cuvette) a zygote or a plurality of zygotes (e.g., from 1 zygote to 150 zygotes; e.g., from 1 zygote to 5 zygotes, from 10 zygotes to 15 zygotes, from 15 zygotes to 20 zygotes, from 20 zygotes to 25 zygotes, from 25 zygotes to 30 zygotes, from 30 zygotes to 35 zygotes, from 35 zygotes to 40 zygotes, from 40 zygotes to 45 zygotes, from 45 zygotes to 50 zygotes, from 50 zygotes to 75 zygotes, from 75 zygotes to 100 zygotes, from 100 zygotes to 120 zygotes, from 120 zygotes to 140 zygotes, or from 140 zygotes to 150 zygotes) in a suitable liquid medium with an equal volume of a composition comprising a polypeptide, forming a zygote/polypeptide composition (an “electroporation mixture”); and b) electroporating the zygote/polypeptide composition with 2 pulses at 30 V, where each pulse is a 3-millisecond (msec) pulse, with a 1 msec interval between the 2 pulses. In some cases, at least 50%, at least 60%, at least 70%, at least 80%, at least 85%, at least 90%, at least 95%, or at least 98%, of the zygotes are viable after electroporation.

[0077] In some cases, a method of the present disclosure comprises: a) combining, in an electroporation container (e.g., an electroporation cuvette) a zygote or a plurality of zygotes (e.g., from 1 zygote to 150 zygotes; e.g., from 1 zygote to 5 zygotes, from 10 zygotes to 15 zygotes, from 15 zygotes to 20 zygotes, from 20 zygotes to 25 zygotes, from 25 zygotes to 30 zygotes, from 30 zygotes to 35 zygotes, from 35 zygotes to 40 zygotes, from 40 zygotes to 45 zygotes, from 45 zygotes to 50 zygotes, from 50 zygotes to 75 zygotes, from 75 zygotes to 100 zygotes, from 100 zygotes to 120 zygotes, from 120 zygotes to 140 zygotes, or from 140 zygotes to 150 zygotes) in a suitable liquid medium with an equal volume of a composition comprising a polypeptide, forming a zygote/polypeptide composition (an “electroporation mixture”); and b) electroporating the zygote/polypeptide composition with a single pulse at 30 V, where the single pulse is a 3-millisecond (msec) pulse. In some cases, at least 50%, at least 60%, at least 70%, at least 80%, at least 85%, at least 90%, at least 95%, or at least 98%, of the zygotes are viable after electroporation.

[0078] In some cases, electroporation of the zygote/polypeptide composition includes electroporating with one or more pulses. In some cases, electroporation of the zygote/polypeptide composition includes electroporating with multiple pulses. In some cases, electroporation of the zygote/polypeptide composition includes electroporating with 3 pulses. In some cases, electroporation of the zygote/polypeptide composition includes electroporating with 4 pulses. In some cases, electroporation of the zygote/polypeptide composition includes electroporating with 5 pulses. In some cases, electroporation of the zygote/polypeptide composition includes electroporating with 6 pulses. In some cases, electroporation of the zygote/polypeptide composition includes electroporating with 7 pulses. In some cases, electroporation of the zygote/polypeptide composition includes electroporating with 8 pulses. In some cases, electroporation of the zygote/polypeptide composition includes electroporating with 9 pulses. In some cases, electroporation of the zygote/polypeptide composition includes electroporating with 10 pulses. In some cases, at least 20%, at least 30%, at least 40%, at least 50%, at least 60%, at least 70%, at least 80%, at least 85%, at least 90%, at least 95%, or at least 98%, of the zygotes are viable after electroporation. In some cases, from 20% to 50% of the zygotes are viable after electroporation. In some cases, from 50% to 95% of the zygotes are viable after electroporation. In some cases, from 60% to 95% of the zygotes are viable after electroporation. In some cases, from 70% to 95% of the zygotes are viable after electroporation. In some cases, from 80% to 95% of the zygotes are viable after electroporation. In some cases, 100% of the zygotes are viable after electroporation.

[0079] In some cases, electroporation of the zygote/polypeptide composition includes electroporating with one or more pulses, where each pulse is a 1-millisecond (msec) pulse. In some cases, electroporation of the zygote/polypeptide composition includes electroporating with one or more pulses, where each pulse is a 2-millisecond (msec) pulse. In some cases, electroporation of the zygote/polypeptide composition includes electroporating with one or more pulses, where each pulse is a 3-millisecond (msec) pulse. In some cases, electroporation of the zygote/polypeptide composition includes electroporating with one or more pulses, where each pulse is a 4-millisecond (msec) pulse. In some cases, electroporation of the zygote/polypeptide composition includes electroporating with one or more pulses, where each pulse is a 3-millisecond (msec) pulse. In some cases, electroporation of the zygote/polypeptide composition includes electroporating with one or more pulses, where each pulse is a 5-millisecond (msec) pulse. In some cases, electroporation of the zygote/polypeptide composition includes electroporating with one or more pulses, where each pulse is a 6-millisecond (msec) pulse. In some cases, electroporation of the zygote/polypeptide composition includes electroporating with one or more pulses, where each pulse is a 7-millisecond pulse. In some cases, electroporation of the zygote/polypeptide composition includes electroporating with one or more pulses, where each pulse is an 8-millisecond pulse. In some cases, electroporation of the zygote/polypeptide composition includes electroporating with one or more pulses, where each pulse is a 9-millisecond pulse. In some cases, electroporation of the zygote/polypeptide composition includes electroporating with one or more pulses, where each pulse is a 10-millisecond pulse.

[0080] In some cases, electroporation of the zygote/polypeptide composition includes electroporating with multiple pulses at 10 V. In some cases, electroporation of the zygote/polypeptide composition includes electroporating with multiple pulses at 15 V. In some cases, electroporation of the zygote/polypeptide composition includes electroporating with multiple pulses at 20 V. In some cases, electroporation of the zygote/polypeptide composition includes electroporating with multiple pulses at 25 V. In some cases, electroporation of the zygote/polypeptide composition includes electroporating with multiple pulses at 30 V. In some cases, electroporation of the zygote/polypeptide composition includes electroporating with multiple pulses at 35 V. In some cases, electroporation of the zygote/polypeptide composition includes electroporating with multiple pulses at 40 V. In some cases, electroporation of the zygote/polypeptide composition includes electroporating with multiple pulses at 45 V. In some cases, electroporation of the zygote/polypeptide composition includes electroporating with multiple pulses at 50 V. In some cases, electroporation of the zygote/polypeptide composition includes electroporating with multiple pulses at 55 V. In some cases, electroporation of the zygote/polypeptide composition includes electroporating with multiple pulses at 60 V.

[0081] In some cases, electroporation of the zygote/polypeptide composition includes electroporating with 2 pulses at 30 volts, where each pulse is a 3-millisecond (msec) pulse. In some cases, electroporation of the zygote/polypeptide composition includes electroporating with 4 pulses at 30 volts, where each pulse is a 3-millisecond (msec) pulse. In some cases, electroporation of the zygote/polypeptide composition includes electroporating with 6 pulses at 30 volts, where each pulse is a 3-millisecond (msec) pulse. In some cases, electroporation of the zygote/polypeptide composition includes electroporating with 8 pulses at 30 volts, where each pulse is a 3-millisecond (msec) pulse. In some cases, electroporation of the zygote/polypeptide composition includes electroporating with 10 pulses at 30 volts, where each pulse is a 3-millisecond (msec) pulse. In some cases, electroporation of the zygote/polypeptide composition includes electroporating with 12 pulses at 30 volts, where each pulse is a 3-millisecond (msec) pulse.

[0082] A method of the present disclosure for delivering a polypeptide or a polynucleotide into a mammalian zygote can be used to deliver a polypeptide or a polynucleotide into any of a variety of mammalian zygotes, including, e.g., a human zygote or a non-human mammalian zygote. Non-human mammalian zygotes include, but are not limited to, a rodent zygote (e.g., a rat zygote; a mouse zygote); a lagomorph zygote (e.g., a rabbit zygote); a feline zygote, e.g., a cat zygote; a canine zygote, e.g., a dog zygote; an ovine (e.g., sheep) zygote; a caprine (e.g., goat) zygote; an equine (e.g., horse) zygote; an ungulate zygote; a non-human primate zygote; etc.

### Modifying Genomic DNA, Labeling Genomic DNA, Regulating Transcription in a Mammalian Zygote

[0083] The present disclosure provides methods of modifying the genome of a mammalian zygote. Methods of the present disclosure generally involve introducing a genome editing composition into a zygote via electroporation, where the genome editing composition comprises: i) a CRISPR/Cas endonuclease (or a nucleic acid comprising a nucleotide sequence encoding the CRISPR/Cas endonuclease); and ii) a corresponding guide RNA (or a nucleic acid comprising a nucleotide sequence encoding the guide RNA). In some cases, the genome editing composition comprises: i) a CRISPR/Cas endonuclease (or a nucleic acid comprising a nucleotide sequence encoding the CRISPR/Cas endonuclease); ii) a corresponding guide RNA (or a nucleic acid comprising a nucleotide sequence encoding the guide RNA); and iii) a donor DNA template (or a nucleic acid comprising a nucleotide sequence encoding the donor DNA template). In some cases, a method of the present disclosure comprises introducing into a mammalian zygote via electroporation a ribonucleoprotein (RNP) comprising a CRISPR/Cas endonuclease and a corresponding guide RNA. In some cases, a method of the present disclosure comprises introducing a genome-editing composition into a zygote via electroporation, where the genome editing composition comprises: a) an RNP comprising a CRISPR/Cas endonuclease and a corresponding guide RNA; and b) a donor DNA template. “Modifying” the genome is used herein interchangeably with “editing” the genome.

[0084] A method of the present disclosure for modifying the genome of a mammalian zygote can be used to modify the genome of any of a variety of mammalian zygotes, including, e.g., a human zygote or a non-human mammalian zygote. Non-human mammalian zygotes include, but are not limited to, a rodent zygote (e.g., a rat zygote; a mouse zygote); a lagomorph zygote (e.g., a rabbit zygote); a feline zygote, e.g., a cat zygote; a canine zygote, e.g., a dog zygote; an ovine (e.g., sheep) zygote; a caprine (e.g., goat) zygote; an equine (e.g., horse) zygote; an ungulate zygote; a non-human primate zygote; etc.

[0085] Genome editing includes non-homologous end joining (NHEJ) and homology-directed repair (HDR). A genome-editing endonuclease generates a single- or double-strand break in a target genomic DNA, and the single- or double-strand break is repaired. Repair that occurs via NHEJ is sometimes referred to an “indel” (insertion or deletion); DNA repair via HDR is sometimes referred to as “gene correction” or “gene modification.” In some cases, editing a target genomic DNA involves generating a substitution of one or more nucleotides in the target genomic DNA, generating an edited target genomic DNA. In some cases, editing a target genomic DNA involves deletion of one or more nucleotides from the target genomic DNA, generating an edited target genomic DNA. In some cases, editing a target genomic DNA involves insertion of one or more nucleotides from the target genomic DNA, generating an edited target genomic DNA.

[0086] A method of the present disclosure for modifying the genome of a zygote will in some cases result in NHEJ. Where a method of the present disclosure results in NHEJ, in some cases, a method of the present disclosure provides for an efficiency of NHEJ of at least 50%, at least 60%, at least 70%, at least 75%, at least 80%, at least 85%, at least 90%, at least 95%, or 100%. For example, where a plurality of zygotes are electroporated together with an RNP complex in an electroporation mixture, at least 50%, at least 60%, at least 70%, at least 75%, at least 80%, at least 85%, at least 90%, at least 95%, or 100%, of the zygotes will undergo NHEJ.

[0087] A method of the present disclosure for modifying the genome of a zygote will in some cases result in HDR. Where a method of the present disclosure results in HDR, in some cases, a method of the present disclosure provides for an efficiency of HDR of at least 15%, at least 20%, at least 25%, at least 30%, at least 35%, at least 40%, at least 45%, at least 50%, or more than 50%. For example, where a plurality of zygotes are electroporated together with an RNP complex and a donor DNA template in an electroporation mixture, at least 15%, at least 20%, at least 25%, at least 30%, at least 35%, at least 40%, at least 45%, at least 50%, or more than 50%, of the zygotes will undergo HDR.

[0088] The present disclosure provides methods of modulating transcription in a mammalian zygote. The methods generally involve introducing into the mammalian zygote an RNP complex comprising an enzymatically inactive CRISPR/Cas endonuclease (also referred to as a “dead Cas9” or “dCas9”) and a corresponding guide RNA. The enzymatically inactive CRISPR/Cas endonuclease retains the ability to bind to a target DNA when complexed with a guide RNA comprising a nucleotide sequence that is complementary to a nucleotide sequence in the target DNA; however, the enzymatically inactive CRISPR/Cas endonuclease does not cleave the target DNA.

[0089] The present disclosure provides methods of labeling a target nucleic acid in the genome of a mammalian zygote. The methods generally involve introducing into the mammalian zygote an RNP complex comprising: a) an enzymatically inactive CRISPR/Cas endonuclease (also referred to as a “dead Cas9” or “dCas9”); or a “nickase” CRISPR/Cas endonuclease (e.g., Cas9 D10A); and b) a corresponding guide RNA. In some cases, the CRISPR/Cas endonuclease comprises a detectable label, e.g., a fluorescent label. See, e.g., Deng et al. (2015) Proc. Natl. Acad. Sci. USA 112:11870. In some cases, the CRISPR/Cas endonuclease is a nickase, and the method is carried out in the presence of fluorescently labeled nucleotides. See, e.g., McCaffrey et al. (2016) Nucl. Acids Res. 44:e11.

[0090] A method of the present disclosure involves electroporating a ribonucleoprotein (RNP) complex into a zygote. In some cases, a method of the present disclosure comprises: a) combining, in an electroporation container (e.g., an electroporation cuvette) a zygote or a plurality of zygotes (e.g., from 1 zygote to 150 zygotes; e.g., from 1 zygote to 5 zygotes, from 10 zygotes to 15 zygotes, from 15 zygotes to 20 zygotes, from 20 zygotes to 25 zygotes, from 25 zygotes to 30 zygotes, from 30 zygotes to 35 zygotes, from 35 zygotes to 40 zygotes, from 40 zygotes to 45 zygotes, from 45 zygotes to 50 zygotes, from 50 zygotes to 75 zygotes, from 75 zygotes to 100 zygotes, from 100 zygotes to 120 zygotes, from 120 zygotes to 140 zygotes, or from 140 zygotes to 150 zygotes) in a suitable liquid medium with an equal volume of a genome targeting composition, forming a zygote/genome targeting composition; and b) electroporating the zygote/genome targeting composition with 2 pulses at 30 V, where each pulse is a 3-millisecond (msec) pulse, with a 1 msec interval between the 2 pulses. In some cases, at least 50%, at least 60%, at least 70%, at least 80%, at least 85%, at least 90%, at least 95%, or at least 98%, of the zygotes are viable after electroporation. In some cases, from 50% to 95% of the zygotes are viable after electroporation. In some cases, from 60% to 95% of the zygotes are viable after electroporation. In some cases, from 70% to 95% of the zygotes are viable after electroporation. In some cases, from 80% to 95% of the zygotes are viable after electroporation. In some cases, 100% of the zygotes are viable after electroporation. In some cases, the genomic modification occurs via HDR or NHEJ. In some cases, the genomic modification occurs via HDR, and wherein the efficiency of HDR is at least 50%, at least 60%, at least 70%, at least 80%, at least 90%, or 100%. In some cases, the genomic modification occurs via NHEJ, and wherein the efficiency of NHEJ is at least 50%, at least 60%, at least 70%, at least 80%, at least 90%, or 100%.

[0091] A method of the present disclosure involves electroporating a ribonucleoprotein (RNP) complex into a zygote. In some cases, a method of the present disclosure comprises: a) combining, in an electroporation container (e.g., an electroporation cuvette) a zygote or a plurality of zygotes (e.g., from 1 zygote to 150 zygotes; e.g., from 1 zygote to 5 zygotes, from 10 zygotes to 15 zygotes, from 15 zygotes to 20 zygotes, from 20 zygotes to 25 zygotes, from 25 zygotes to 30 zygotes, from 30 zygotes to 35 zygotes, from 35 zygotes to 40 zygotes, from 40 zygotes to 45 zygotes, from 45 zygotes to 50 zygotes, from 50 zygotes to 75 zygotes, from 75 zygotes to 100 zygotes, from 100 zygotes to 120 zygotes, from 120 zygotes to 140 zygotes, or from 140 zygotes to 150 zygotes) in a suitable liquid medium with an equal volume of a genome targeting composition, forming a zygote/genome targeting composition; and b) electroporating the zygote/genome targeting composition with a single pulse at 30 V, where the single pulse is a 3-millisecond (msec) pulse. In some cases, at least 50%, at least 60%, at least 70%, at least 80%, at least 85%, at least 90%, at least 95%, or at least 98%, of the zygotes are viable after electroporation. In some cases, from 50% to 95% of the zygotes are viable after electroporation. In some cases, from 60% to 95% of the zygotes are viable after electroporation. In some cases, from 70% to 95% of the zygotes are viable after electroporation. In some cases, from 80% to 95% of the zygotes are viable after electroporation. In some cases, 100% of the zygotes are viable after electroporation. In some cases, the genomic modification occurs via HDR or NHEJ. In some cases, the genomic modification occurs via HDR, and wherein the efficiency of HDR is at least 50%, at least 60%, at least 70%, at least 80%, at least 90%, or 100%. In some cases, the genomic modification occurs via NHEJ, and wherein the efficiency of NHEJ is at least 50%, at least 60%, at least 70%, at least 80%, at least 90%, or 100%.

[0092] In some cases, a method of the present disclosure comprises: a) combining, in an electroporation container (e.g., an electroporation cuvette) a zygote or a plurality of zygotes (e.g., from 1 zygote to 150 zygotes; e.g., from 1 zygote to 5 zygotes, from 10 zygotes to 15 zygotes, from 15 zygotes to 20 zygotes, from 20 zygotes to 25 zygotes, from 25 zygotes to 30 zygotes, from 30 zygotes to 35 zygotes, from 35 zygotes to 40 zygotes, from 40 zygotes to 45 zygotes, from 45 zygotes to 50 zygotes, from 50 zygotes to 75 zygotes, from 75 zygotes to 100 zygotes, from 100 zygotes to 120 zygotes, from 120 zygotes to 140 zygotes, or from 140 zygotes to 150 zygotes) in a suitable liquid medium with an equal volume of an RNP complex, forming a zygote/RNP complex composition (an “electroporation mixture” or an “electroporation composition”); and b) electroporating the zygote/RNP complex composition with a single pulse at 30 V, where the single pulse is a 3-msec pulse. In some cases, the RNP is present in the electroporation composition at a concentration of from 5 μM to 16 μM. In some cases, the RNP is present in the electroporation composition at a concentration of 8 μM. In some cases, at least 50%, at least 60%, at least 70%, at least 80%, at least 85%, at least 90%, at least 95%, or at least 98%, of the zygotes are viable after electroporation with the RNP. In some cases, from 50% to 95% of the zygotes are viable after electroporation with the RNP. In some cases, from 60% to 95% of the zygotes are viable after electroporation with the RNP. In some cases, from 70% to 95% of the zygotes are viable after electroporation with the RNP. In some cases, from 80% to 95% of the zygotes are viable after electroporation with the RNP. In some cases, 100% of the zygotes are viable after electroporation with the RNP. In some cases, the genomic modification occurs via homology-directed repair (HDR) or non-homologous end joining (NHEJ). In some cases, the genomic modification occurs via HDR, and wherein the efficiency of HDR is at least 50%, at least 60%, at least 70%, at least 80%, at least 90%, or 100%. In some cases, the genomic modification occurs via NHEJ, and wherein the efficiency of NHEJ is at least 50%, at least 60%, at least 70%, at least 80%, at least 90%, or 100%.

[0093] In some cases, the RNP complex comprises an RNA and a DNA-binding polypeptide, where the RNA and the DNA-binding polypeptide are present in a ratio of from 0.5:1 to 1:1, from 1:1 to 1:1.5, or from 1:1.5 to 1:2 RNA:DNA-binding polypeptide. In some cases, the RNP complex is present in the electroporation mixture at a concentration of from 5 μM to 15 μM, e.g., from 5 μM to 10 μM, or from 10 μM to 15 μM. In some cases, the RNP complex is present in the electroporation mixture at a concentration of 8 μM. In some cases, the electroporation mixture includes a donor DNA template. The donor DNA template can be part of the RNP, or can be separate from the RNP.

[0094] In some cases, from 1 to 10 pulses of 30 V each are applied. In some cases, a single pulse of 30 V is applied. In some cases, 2 pulses of 30 V each are applied. In some cases, 3 pulses of 30 V each are applied. In some cases, 4 pulses of 30 V each are applied. In some cases, 5 pulses of 30 V each are applied. In some cases, 6 pulses of 30 V each are applied. In some cases, 7 pulses of 30 V each are applied. In some cases, 8 pulses of 30 V each are applied. In some cases, 9 pulses of 30 V each are applied. In some cases, 10 pulses of 30 V each are applied. Each pulse can be from 1 millisecond to 10 milliseconds in duration. In some cases, each pulse is a 1-millisecond pulse. In some cases, each pulse is a 2-millisecond pulse. In some cases, each pulse is a 3-millisecond pulse. In some cases, each pulse is a 4-millisecond pulse. In some cases, each pulse is a 5-millisecond pulse. In some cases, each pulse is a 6-millisecond pulse. In some cases, each pulse is a 7-millisecond pulse. In some cases, each pulse is an 8-millisecond pulse. In some cases, each pulse is a 9-millisecond pulse. In some cases, each pulse is a 10-millisecond pulse. In some case, 6 pulses of 30 V per pulse are applied, where each pulse is a 3-millisecond pulse.

### Genome Targeting Compositions

[0095] A genome targeting composition is a composition that includes a genome editing nuclease that is (or can be) targeted to a desired sequence within a target genome.

[0096] Examples of suitable genome editing nucleases are CRISPR/Cas endonucleases (e.g., class 2 CRISPR/Cas endonucleases such as a type II, type V, or type VI CRISPR/Cas endonucleases). Thus, a genome targeting composition can include a CRISPR/Cas endonuclease (e.g., a class 2 CRISPR/Cas endonuclease such as a type II, type V, or type VI CRISPR/Cas endonuclease). In some cases, a genome targeting composition includes a class 2 CRISPR/Cas endonuclease. In some cases, a genome targeting composition includes a class 2 type II CRISPR/Cas endonuclease (e.g., a Cas9 protein). In some cases, a genome targeting composition includes a class 2 type V CRISPR/Cas endonuclease (e.g., a Cpf1 protein, a C2c1 protein, or a C2c3 protein). In some cases, a genome targeting composition includes a class 2 type VI CRISPR/Cas endonuclease (e.g., a C2c2 protein).

[0097] As described in more detail below, a CRISPR/Cas endonuclease interacts with (binds to) a corresponding guide RNA to form a ribonucleoprotein (RNP) complex that is targeted to a particular site in a target genome via base pairing between the guide RNA and a target sequence within the target genome. A guide RNA includes a nucleotide sequence (a guide sequence) that is complementary to a sequence (the target site) of a target nucleic acid. Thus, when a subject genome targeting composition includes a CRISPR/Cas endonuclease (e.g., a class 2 CRISPR/Cas endonuclease), it must also include a corresponding guide RNA when being used in a method to cleave a target DNA. However, because the guide RNA can be readily modified in order to target any desired sequence within a target genome, in some cases, a composition includes only the CRISPR/Cas endonuclease (or a nucleic acid encoding the CRISPR/Cas endonuclease) until a user adds the desired corresponding guide RNA (or a nucleic acid encoding the corresponding guide RNA).

[0098] The components of a genome targeting composition can be delivered (introduced into a zygote) as DNA, RNA, or protein. For example, when the composition includes a class 2 CRISPR/Cas endonuclease (e.g., Cas9, Cpf1, etc.) and a corresponding guide RNA (e.g., a Cas9 guide RNA, a Cpf1 guide RNA, etc.), the endonuclease and guide RNA can be delivered (introduced into the zygote) as an RNP complex (i.e., a pre-assembled complex of the CRISPR/Cas endonuclease and the corresponding CRISPR/Cas guide RNA). Thus, a class 2 CRISPR/Cas endonuclease can be introduced into a zygote as a protein. Alternatively, a class 2 CRISPR/Cas endonuclease can be introduced into a zygote as a nucleic acid (DNA and/or RNA) encoding the endonuclease. A CRISPR/Cas guide RNA can be introduced into a zygote as RNA, or as DNA encoding the guide RNA.

[0099] In some cases, a genome editing nuclease is a fusion protein that is fused to a heterologous polypeptide (also referred to as a “fusion partner”). In some cases, a genome editing nuclease is fused to an amino acid sequence (a fusion partner) that provides for subcellular localization, i.e., the fusion partner is a subcellular localization sequence (e.g., one or more nuclear localization signals (NLSs) for targeting to the nucleus, two or more NLSs, three or more NLSs, etc.). In some embodiments, a genome editing nuclease is fused to an amino acid sequence (a fusion partner) that provides a tag (i.e., the fusion partner is a detectable label) for ease of tracking and/or purification (e.g., a fluorescent protein, e.g., green fluorescent protein (GFP), YFP, RFP, CFP, mCherry, tdTomato, and the like; a histidine tag, e.g., a 6×His tag; a hemagglutinin (HA) tag; a FLAG tag; a Myc tag; and the like). In some embodiments, the fusion partner can provide for increased or decreased stability (i.e., the fusion partner can be a stability control peptide, e.g., a degron, which in some cases is controllable (e.g., a temperature sensitive or drug controllable degron sequence).

[0100] In some cases, a genome editing nuclease is conjugated (e.g., fused) to a polypeptide permeant domain to promote uptake by the zygote (i.e., the fusion partner promotes uptake by a cell). A number of permeant domains are known in the art and may be used, including peptides, peptidomimetics, and non-peptide carriers. For example, a permeant peptide may be derived from the third alpha helix of Drosophila melanogaster transcription factor Antennapaedia, referred to as penetratin, which comprises the amino acid sequence RQIKIWFQNRRMKWKK (SEQ ID NO: 1080). As another example, the permeant peptide can comprise the HIV-1 tat basic region amino acid sequence, which may include, for example, amino acids 49-57 of naturally-occurring tat protein. Other permeant domains include poly-arginine motifs, for example, the region of amino acids 34-56 of HIV-1 rev protein, nona-arginine, octa-arginine, and the like. (See, for example, Futaki et al. (2003) Curr Protein Pept Sci. 2003 April; 4(2): 87-9 and 446; and Wender et al. (2000) Proc. Natl. Acad. Sci. U.S.A 2000 Nov. 21; 97(24):13003-8; published U.S. Patent applications 20030220334; 20030083256; 20030032593; and 20030022831, herein specifically incorporated by reference for the teachings of translocation peptides and peptoids). The nona-arginine (R9) sequence is one of the more efficient PTDs that have been characterized (Wender et al. 2000; Uemura et al. 2002). The site at which the fusion is made may be selected in order to optimize the biological activity, secretion or binding characteristics of the polypeptide. The optimal site can be determined by routine experimentation.

[0101] In some cases, a genome editing nuclease includes a “Protein Transduction Domain” or PTD (also known as a CPP—cell penetrating peptide), which refers to a polypeptide, polynucleotide, carbohydrate, or organic or inorganic compound that facilitates traversing a lipid bilayer, micelle, cell membrane, organelle membrane, or vesicle membrane. A PTD attached to another molecule, which can range from a small polar molecule to a large macromolecule and/or a nanoparticle, facilitates the molecule traversing a membrane, for example going from extracellular space to intracellular space, or cytosol to within an organelle. In some embodiments, a PTD is covalently linked to the amino terminus a polypeptide (e.g., a genome editing nuclease, e.g., a Cas9 protein). In some embodiments, a PTD is covalently linked to the carboxyl terminus of a polypeptide (e.g., a genome editing nuclease, e.g., a Cas9 protein). In some cases, the PTD is inserted internally in the genome editing nuclease (e.g., Cas9 protein) (i.e., is not at the N- or C-terminus of the genome editing nuclease). In some cases, a subject genome editing nuclease (e.g., Cas9 protein) includes (is conjugated to, is fused to) one or more PTDs (e.g., two or more, three or more, four or more PTDs). In some cases a PTD includes a nuclear localization signal (NLS) (e.g., in some cases 2 or more, 3 or more, 4 or more, or 5 or more NLSs).

[0102] In some cases, a genome editing nuclease (e.g., Cas9 protein) includes one or more NLSs (e.g., 2 or more, 3 or more, 4 or more, or 5 or more NLSs). In some embodiments, a PTD is covalently linked to a nucleic acid (e.g., a CRISPR/Cas guide RNA, a polynucleotide encoding a CRISPR/Cas guide RNA, a polynucleotide encoding a class 2 CRISPR/Cas endonuclease such as a Cas9 protein or a type V or type VI CRISPR/Cas protein, etc.). Examples of PTDs include but are not limited to a minimal undecapeptide protein transduction domain (corresponding to residues 47-57 of HIV-1 TAT comprising YGRKKRRQRRR; SEQ ID NO: 1076); a polyarginine sequence comprising a number of arginines sufficient to direct entry into a cell (e.g., 3, 4, 5, 6, 7, 8, 9, 10, or 10-50 arginines); a VP22 domain (Zender et al. (2002) Cancer Gene Ther. 9(6):489-96); an Drosophila Antennapedia protein transduction domain (Noguchi et al. (2003) Diabetes 52(7):1732-1737); a truncated human calcitonin peptide (Trehin et al. (2004) Pharm. Research 21:1248-1256); polylysine (Wender et al. (2000) Proc. Natl. Acad. Sci. USA 97:13003-13008); RRQRRTSKLMKR (SEQ ID NO:1077); Transportan GWTLNSAGYLLGKINLKALAALAKKIL (SEQ ID NO:1078); KALAWEAKLAKALAKALAKHLAKALAKALKCEA (SEQ ID NO:1079); and RQIKIWFQNRRMKWKK (SEQ ID NO: 1080). Exemplary PTDs include but are not limited to, YGRKKRRQRRR (SEQ ID NO:1081), RKKRRQRRR (SEQ ID NO:1082); an arginine homopolymer of from 3 arginine residues to 50 arginine residues; Exemplary PTD domain amino acid sequences include, but are not limited to, any of the following: YGRKKRRQRRR (SEQ ID NO:1083); RKKRRQRR (SEQ ID NO:1084); YARAAARQARA (SEQ ID NO:1085); THRLPRRRRRR (SEQ ID NO:1086); and GGRRARRRRRR (SEQ ID NO:1087). In some embodiments, the PTD is an activatable CPP (ACPP) (Aguilera et al. (2009) Integr Biol (Camb) June; 1(5-6): 371-381). ACPPs comprise a polycationic CPP (e.g., Arg9 or “R9”) connected via a cleavable linker to a matching polyanion (e.g., Glu9 or “E9”), which reduces the net charge to nearly zero and thereby inhibits adhesion and uptake into cells. Upon cleavage of the linker, the polyanion is released, locally unmasking the polyarginine and its inherent adhesiveness, thus “activating” the ACPP to traverse the membrane.

[0103] A genome editing nuclease (e.g., Cas9 protein) can have multiple (1 or more, 2 or more, 3 or more, etc.) fusion partners in any combination of the above. As an illustrative example, a genome editing nuclease (e.g., Cas9 protein) can have a fusion partner that provides for tagging (e.g., GFP), and can also have a subcellular localization sequence (e.g., one or more NLSs). In some cases, such a fusion protein might also have a tag for ease of tracking and/or purification (e.g., a histidine tag, e.g., a 6×His (His-His-His-His-His-His) tag; a hemagglutinin (HA) tag; a FLAG tag; a Myc tag; and the like). As another illustrative example, genome editing nuclease (e.g., Cas9 protein) can have one or more NLSs (e.g., two or more, three or more, four or more, five or more, 1, 2, 3, 4, or 5 NLSs). In some cases a fusion partner (or multiple fusion partners, e.g., 1, 2, 3, 4, or 5 NLSs) (e.g., an NLS, a tag, a fusion partner providing an activity, etc.) is located at or near the C-terminus of the genome editing nuclease (e.g., Cas9 protein). In some cases a fusion partner (or multiple fusion partners, e.g., 1, 2, 3, 4, or 5 NLSs) (e.g., an NLS, a tag, a fusion partner providing an activity, etc.) is located at the N-terminus of the genome editing nuclease (e.g., Cas9 protein). In some cases the genome editing nuclease (e.g., Cas9 protein) has a fusion partner (or multiple fusion partners, e.g., 1, 2, 3, 4, or 5 NLSs)(e.g., an NLS, a tag, a fusion partner providing an activity, etc.) at both the N-terminus and C-terminus.

### Class 2 CRISPR/Cas Endonucleases

[0104] RNA-mediated adaptive immune systems in bacteria and archaea rely on Clustered Regularly Interspaced Short Palindromic Repeat (CRISPR) genomic loci and CRISPR-associated (Cas) proteins that function together to provide protection from invading viruses and plasmids. In some embodiments, a genome editing nuclease of a genome targeting composition of the present disclosure is a class 2 CRISPR/Cas endonuclease. Thus in some cases, a subject genome targeting composition includes a class 2 CRISPR/Cas endonuclease (or a nucleic encoding the endonuclease). In class 2 CRISPR systems, the functions of the effector complex (e.g., the cleavage of target DNA) are carried out by a single endonuclease (e.g., see Zetsche et al, Cell. 2015 Oct. 22; 163(3):759-71; Makarova et al, Nat Rev Microbiol. 2015 November; 13(11):722-36; and Shmakov et al., Mol Cell. 2015 Nov. 5; 60(3):385-97). As such, the term “class 2 CRISPR/Cas protein” is used herein to encompass the endonuclease (the target nucleic acid cleaving protein) from class 2 CRISPR systems. Thus, the term “class 2 CRISPR/Cas endonuclease” as used herein encompasses type II CRISPR/Cas proteins (e.g., Cas9), type V CRISPR/Cas proteins (e.g., Cpf1, C2c1, C2C3), and type VI CRISPR/Cas proteins (e.g., C2c2). To date, class 2 CRISPR/Cas proteins encompass type II, type V, and type VI CRISPR/Cas proteins, but the term is also meant to encompass any class 2 CRISPR/Cas protein suitable for binding to a corresponding guide RNA and forming an RNP complex.

### Type II CRISPR/Cas Endonucleases (e.g., Cas 9)

[0105] In natural Type II CRISPR/Cas systems, Cas9 functions as an RNA-guided endonuclease that uses a dual-guide RNA having a crRNA and trans-activating crRNA (tracrRNA) for target recognition and cleavage by a mechanism involving two nuclease active sites in Cas9 that together generate double-stranded DNA breaks (DSBs), or can individually generate single-stranded DNA breaks (SSBs). The Type II CRISPR endonuclease Cas9 and engineered dual- (dgRNA) or single guide RNA (sgRNA) form a ribonucleoprotein (RNP) complex that can be targeted to a desired DNA sequence. Guided by a dual-RNA complex or a chimeric single-guide RNA, Cas9 generates site-specific DSBs or SSBs within double-stranded DNA (dsDNA) target nucleic acids, which are repaired either by non-homologous end joining (NHEJ) or homology-directed recombination (HDR).

[0106] As noted above, in some cases, a genome targeting composition of the present disclosure includes a type II CRISPR/Cas endonuclease. A type II CRISPR/Cas endonuclease is a type of class 2 CRISPR/Cas endonuclease. In some cases, the type II CRISPR/Cas endonuclease is a Cas9 protein. A Cas9 protein forms a complex with a Cas9 guide RNA. The guide RNA provides target specificity to a Cas9-guide RNA complex by having a nucleotide sequence (a guide sequence) that is complementary to a sequence (the target site) of a target nucleic acid (as described elsewhere herein). The Cas9 protein of the complex provides the site-specific activity. In other words, the Cas9 protein is guided to a target site (e.g., stabilized at a target site) within a target nucleic acid sequence (e.g. a chromosomal sequence or an extrachromosomal sequence, e.g., an episomal sequence, a minicircle sequence, a mitochondrial sequence, a chloroplast sequence, etc.) by virtue of its association with the protein-binding segment of the Cas9 guide RNA.

[0107] A Cas9 protein can bind and/or modify (e.g., cleave, nick, methylate, demethylate, etc.) a target nucleic acid and/or a polypeptide associated with target nucleic acid (e.g., methylation or acetylation of a histone tail)(e.g., when the Cas9 protein includes a fusion partner with an activity). In some cases, the Cas9 protein is a naturally-occurring protein (e.g., naturally occurs in bacterial and/or archaeal cells). In other cases, the Cas9 protein is not a naturally-occurring polypeptide (e.g., the Cas9 protein is a variant Cas9 protein, a chimeric protein, and the like).

[0108] Examples of suitable Cas9 proteins include, but are not limited to, those set forth in SEQ ID NOs: 5-816. Naturally occurring Cas9 proteins bind a Cas9 guide RNA, are thereby directed to a specific sequence within a target nucleic acid (a target site), and cleave the target nucleic acid (e.g., cleave dsDNA to generate a double strand break, cleave ssDNA, cleave ssRNA, etc.). A chimeric Cas9 protein is a fusion protein comprising a Cas9 polypeptide that is fused to a heterologous protein (referred to as a fusion partner), where the heterologous protein provides an activity (e.g., one that is not provided by the Cas9 protein). The fusion partner can provide an activity, e.g., enzymatic activity (e.g., nuclease activity, activity for DNA and/or RNA methylation, activity for DNA and/or RNA cleavage, activity for histone acetylation, activity for histone methylation, activity for RNA modification, activity for RNA-binding, activity for RNA splicing etc.). In some cases a portion of the Cas9 protein (e.g., the RuvC domain and/or the HNH domain) exhibits reduced nuclease activity relative to the corresponding portion of a wild type Cas9 protein (e.g., in some cases the Cas9 protein is a nickase). In some cases, the Cas9 protein is enzymatically inactive, or has reduced enzymatic activity relative to a wild-type Cas9 protein (e.g., relative to Streptococcus pyogenes Cas9).

[0109] Assays to determine whether given protein interacts with a Cas9 guide RNA can be any convenient binding assay that tests for binding between a protein and a nucleic acid. Suitable binding assays (e.g., gel shift assays) will be known to one of ordinary skill in the art (e.g., assays that include adding a Cas9 guide RNA and a protein to a target nucleic acid).

[0110] Assays to determine whether a protein has an activity (e.g., to determine if the protein has nuclease activity that cleaves a target nucleic acid and/or some heterologous activity) can be any convenient assay (e.g., any convenient nucleic acid cleavage assay that tests for nucleic acid cleavage). Suitable assays (e.g., cleavage assays) will be known to one of ordinary skill in the art and can include adding a Cas9 guide RNA and a protein to a target nucleic acid.

[0111] In some cases, a chimeric Cas9 protein includes a heterologous polypeptide that has enzymatic activity that modifies target nucleic acid (e.g., nuclease activity, methyltransferase activity, demethylase activity, DNA repair activity, DNA damage activity, deamination activity, dismutase activity, alkylation activity, depurination activity, oxidation activity, pyrimidine dimer forming activity, integrase activity, transposase activity, recombinase activity, polymerase activity, ligase activity, helicase activity, photolyase activity or glycosylase activity).

[0112] In other cases, a chimeric Cas9 protein includes a heterologous polypeptide that has enzymatic activity that modifies a polypeptide (e.g., a histone) associated with target nucleic acid (e.g., methyltransferase activity, demethylase activity, acetyltransferase activity, deacetylase activity, kinase activity, phosphatase activity, ubiquitin ligase activity, deubiquitinating activity, adenylation activity, deadenylation activity, SUMOylating activity, deSUMOylating activity, ribosylation activity, deribosylation activity, myristoylation activity or demyristoylation activity).

[0113] Many Cas9 orthologs from a wide variety of species have been identified and in some cases the proteins share only a few identical amino acids. Identified Cas9 orthologs have similar domain architecture with a central HNH endonuclease domain and a split RuvC/RNaseH domain (e.g., RuvCI, RuvCII, and RuvCIII) (e.g., see Table 1). For example, a Cas9 protein can have 3 different regions (sometimes referred to as RuvC-I, RuvC-II, and RucC-III), that are not contiguous with respect to the primary amino acid sequence of the Cas9 protein, but fold together to form a RuvC domain once the protein is produced and folds. Thus, Cas9 proteins can be said to share at least 4 key motifs with a conserved architecture. Motifs 1, 2, and 4 are RuvC like motifs while motif 3 is an HNH-motif. The motifs set forth in Table 1 may not represent the entire RuvC-like and/or HNH domains as accepted in the art, but Table 1 does present motifs that can be used to help determine whether a given protein is a Cas9 protein.

TABLE 1
Table 1 lists 4 motifs that are present in Cas9 sequences from various
species. The amino acids listed in Table 1 are from the Cas9 from S.
pyogenes (SEQ ID NO: 5).

| Motif # | Motif | Amino acids (residue #s) | Highly conserved |
|---|---|---|---|
| 1 | RuvC-like I | IGLDIGTNSVGWAVI (7-21) | D10, G12, G17 |
| | | (SEQ ID NO: 1) | |
| 2 | RuvC-like II | IVIEMARE (759-766) | E762 |
| | | (SEQ ID NO: 2) | |
| 3 | HNH-motif | DVDHIVPQSFLKDDSIDNKVLTRSDK | H840, N854, N863 |
| | | N (837-863) (SEQ ID NO: 3) | |
| 4 | RuvC-like | HHAHDAYL (982-989) | H982, H983, A984, |
| | III | (SEQ ID NO: 4) | D986, A987 |

[0114] In some cases, a suitable Cas9 protein comprises an amino acid sequence having 4 motifs, each of motifs 1-4 having 60% or more, 70% or more, 75% or more, 80% or more, 85% or more, 90% or more, 95% or more, 99% or more or 100% amino acid sequence identity to motifs 1-4 as set forth in SEQ ID NOs: 1-4, respectively (e.g., see Table 1), or to the corresponding portions in any of the amino acid sequences set forth in SEQ ID NOs: 5-816.

[0115] In other words, in some cases, a suitable Cas9 polypeptide comprises an amino acid sequence having 4 motifs, each of motifs 1-4 having 60% or more, 70% or more, 75% or more, 80% or more, 85% or more, 90% or more, 95% or more, 99% or more or 100% amino acid sequence identity to motifs 1-4 of the Cas9 amino acid sequence set forth in SEQ ID NO: 5 (e.g., the sequences set forth in SEQ ID NOs: 1-4, e.g., see Table 1), or to the corresponding portions in any of the amino acid sequences set forth in SEQ ID NOs: 6-816.

[0116] In some cases, a suitable Cas9 protein comprises an amino acid sequence having 4 motifs, each of motifs 1-4 having 60% or more amino acid sequence identity to motifs 1-4 of the Cas9 amino acid sequence set forth as SEQ ID NO: 5 (the motifs are in Table 1, and are set forth as SEQ ID NOs: 1-4, respectively), or to the corresponding portions in any of the amino acid sequences set forth in SEQ ID NOs: 6-816. In some cases, a suitable Cas9 protein comprises an amino acid sequence having 4 motifs, each of motifs 1-4 having 70% or more amino acid sequence identity to motifs 1-4 of the Cas9 amino acid sequence set forth as SEQ ID NO: 5 (the motifs are in Table 1, and are set forth as SEQ ID NOs: 1-4, respectively), or to the corresponding portions in any of the amino acid sequences set forth in SEQ ID NOs: 6-816. In some cases, a suitable Cas9 protein comprises an amino acid sequence having 4 motifs, each of motifs 1-4 having 75% or more amino acid sequence identity to motifs 1-4 of the Cas9 amino acid sequence set forth as SEQ ID NO: 5 (the motifs are in Table 1, and are set forth as SEQ ID NOs: 1-4, respectively), or to the corresponding portions in any of the amino acid sequences set forth in SEQ ID NOs: 6-816. In some cases, a suitable Cas9 protein comprises an amino acid sequence having 4 motifs, each of motifs 1-4 having 80% or more amino acid sequence identity to motifs 1-4 of the Cas9 amino acid sequence set forth as SEQ ID NO: 5 (the motifs are in Table 1, and are set forth as SEQ ID NOs: 1-4, respectively), or to the corresponding portions in any of the amino acid sequences set forth in SEQ ID NOs: 6-816. In some cases, a suitable Cas9 protein comprises an amino acid sequence having 4 motifs, each of motifs 1-4 having 85% or more amino acid sequence identity to motifs 1-4 of the Cas9 amino acid sequence set forth as SEQ ID NO: 5 (the motifs are in Table 1, and are set forth as SEQ ID NOs: 1-4, respectively), or to the corresponding portions in any of the amino acid sequences set forth in SEQ ID NOs: 6-816. In some cases, a suitable Cas9 protein comprises an amino acid sequence having 4 motifs, each of motifs 1-4 having 90% or more amino acid sequence identity to motifs 1-4 of the Cas9 amino acid sequence set forth as SEQ ID NO: 5 (the motifs are in Table 1, and are set forth as SEQ ID NOs: 1-4, respectively), or to the corresponding portions in any of the amino acid sequences set forth in SEQ ID NOs: 6-816. In some cases, a suitable Cas9 protein comprises an amino acid sequence having 4 motifs, each of motifs 1-4 having 95% or more amino acid sequence identity to motifs 1-4 of the Cas9 amino acid sequence set forth as SEQ ID NO: 5 (the motifs are in Table 1, and are set forth as SEQ ID NOs: 1-4, respectively), or to the corresponding portions in any of the amino acid sequences set forth in SEQ ID NOs: 6-816. In some cases, a suitable Cas9 protein comprises an amino acid sequence having 4 motifs, each of motifs 1-4 having 99% or more amino acid sequence identity to motifs 1-4 of the Cas9 amino acid sequence set forth as SEQ ID NO: 5 (the motifs are in Table 1, and are set forth as SEQ ID NOs: 1-4, respectively), or to the corresponding portions in any of the amino acid sequences set forth in SEQ ID NOs: 6-816. In some cases, a suitable Cas9 protein comprises an amino acid sequence having 4 motifs, each of motifs 1-4 having 100% amino acid sequence identity to motifs 1-4 of the Cas9 amino acid sequence set forth as SEQ ID NO: 5 (the motifs are in Table 1, and are set forth as SEQ ID NOs: 1-4, respectively), or to the corresponding portions in any of the amino acid sequences set forth in SEQ ID NOs: 6-816. Any Cas9 protein as defined above can be used as a Cas9 polypeptide, as part of a chimeric Cas9 polypeptide (e.g., a Cas9 fusion protein), any of which can be used in an RNP of the present disclosure.

[0117] In some cases, a suitable Cas9 protein comprises an amino acid sequence having 60% or more, 70% or more, 75% or more, 80% or more, 85% or more, 90% or more, 95% or more, 99% or more or 100% amino acid sequence identity to amino acids 7-166 or 731-1003 of the Cas9 amino acid sequence set forth in SEQ ID NO: 5, or to the corresponding portions in any of the amino acid sequences set forth as SEQ ID NOs: 6-816.

[0118] In some cases, a suitable Cas9 protein comprises an amino acid sequence having 60% or more amino acid sequence identity to amino acids 7-166 or 731-1003 of the Cas9 amino acid sequence set forth in SEQ ID NO: 5, or to the corresponding portions in any of the amino acid sequences set forth as SEQ ID NOs: 6-816. In some cases, a suitable Cas9 protein comprises an amino acid sequence having 70% or more amino acid sequence identity to amino acids 7-166 or 731-1003 of the Cas9 amino acid sequence set forth in SEQ ID NO: 5, or to the corresponding portions in any of the amino acid sequences set forth as SEQ ID NOs: 6-816. In some cases, a suitable Cas9 protein comprises an amino acid sequence having 75% or more amino acid sequence identity to amino acids 7-166 or 731-1003 of the Cas9 amino acid sequence set forth in SEQ ID NO: 5, or to the corresponding portions in any of the amino acid sequences set forth as SEQ ID NOs: 6-816. In some cases, a suitable Cas9 protein comprises an amino acid sequence having 80% or more amino acid sequence identity to amino acids 7-166 or 731-1003 of the Cas9 amino acid sequence set forth in SEQ ID NO: 5, or to the corresponding portions in any of the amino acid sequences set forth as SEQ ID NOs: 6-816. In some cases, a suitable Cas9 protein comprises an amino acid sequence having 85% or more amino acid sequence identity to amino acids 7-166 or 731-1003 of the Cas9 amino acid sequence set forth in SEQ ID NO: 5, or to the corresponding portions in any of the amino acid sequences set forth as SEQ ID NOs: 6-816. In some cases, a suitable Cas9 protein comprises an amino acid sequence having 90% or more amino acid sequence identity to amino acids 7-166 or 731-1003 of the Cas9 amino acid sequence set forth in SEQ ID NO: 5, or to the corresponding portions in any of the amino acid sequences set forth as SEQ ID NOs: 6-816. In some cases, a suitable Cas9 protein comprises an amino acid sequence having 95% or more amino acid sequence identity to amino acids 7-166 or 731-1003 of the Cas9 amino acid sequence set forth in SEQ ID NO: 5, or to the corresponding portions in any of the amino acid sequences set forth as SEQ ID NOs: 6-816. In some cases, a suitable Cas9 protein comprises an amino acid sequence having 99% or more amino acid sequence identity to amino acids 7-166 or 731-1003 of the Cas9 amino acid sequence set forth in SEQ ID NO: 5, or to the corresponding portions in any of the amino acid sequences set forth as SEQ ID NOs: 6-816. In some cases, a suitable Cas9 protein comprises an amino acid sequence having 100% amino acid sequence identity to amino acids 7-166 or 731-1003 of the Cas9 amino acid sequence set forth in SEQ ID NO: 5, or to the corresponding portions in any of the amino acid sequences set forth as SEQ ID NOs: 6-816. Any Cas9 protein as defined above can be used as a Cas9 polypeptide, as part of a chimeric Cas9 polypeptide (e.g., a Cas9 fusion protein), any of which can be used in an RNP of the present disclosure.

[0119] In some cases, a suitable Cas9 protein comprises an amino acid sequence having 60% or more, 70% or more, 75% or more, 80% or more, 85% or more, 90% or more, 95% or more, 99% or more or 100% amino acid sequence identity to the Cas9 amino acid sequence set forth in SEQ ID NO: 5, or to any of the amino acid sequences set forth as SEQ ID NOs: 6-816.

[0120] In some cases, a suitable Cas9 protein comprises an amino acid sequence having 60% or more amino acid sequence identity to the Cas9 amino acid sequence set forth in SEQ ID NO: 5, or to any of the amino acid sequences set forth as SEQ ID NOs: 6-816. In some cases, a suitable Cas9 protein comprises an amino acid sequence having 70% or more amino acid sequence identity to the Cas9 amino acid sequence set forth in SEQ ID NO: 5, or to any of the amino acid sequences set forth as SEQ ID NOs: 6-816. In some cases, a suitable Cas9 protein comprises an amino acid sequence having 75% or more amino acid sequence identity to the Cas9 amino acid sequence set forth in SEQ ID NO: 5, or to any of the amino acid sequences set forth as SEQ ID NOs: 6-816. In some cases, a suitable Cas9 protein comprises an amino acid sequence having 80% or more amino acid sequence identity to the Cas9 amino acid sequence set forth in SEQ ID NO: 5, or to any of the amino acid sequences set forth as SEQ ID NOs: 6-816. In some cases, a suitable Cas9 protein comprises an amino acid sequence having 85% or more amino acid sequence identity to the Cas9 amino acid sequence set forth in SEQ ID NO: 5, or to any of the amino acid sequences set forth as SEQ ID NOs: 6-816. In some cases, a suitable Cas9 protein comprises an amino acid sequence having 90% or more amino acid sequence identity to the Cas9 amino acid sequence set forth in SEQ ID NO: 5, or to any of the amino acid sequences set forth as SEQ ID NOs: 6-816. In some cases, a suitable Cas9 protein comprises an amino acid sequence having 95% or more amino acid sequence identity to the Cas9 amino acid sequence set forth in SEQ ID NO: 5, or to any of the amino acid sequences set forth as SEQ ID NOs: 6-816. In some cases, a suitable Cas9 protein comprises an amino acid sequence having 99% or more amino acid sequence identity to the Cas9 amino acid sequence set forth in SEQ ID NO: 5, or to any of the amino acid sequences set forth as SEQ ID NOs: 6-816. In some cases, a suitable Cas9 protein comprises an amino acid sequence having 100% amino acid sequence identity to the Cas9 amino acid sequence set forth in SEQ ID NO: 5, or to any of the amino acid sequences set forth as SEQ ID NOs: 6-816. Any Cas9 protein as defined above can be used as a Cas9 polypeptide, as part of a chimeric Cas9 polypeptide (e.g., a Cas9 fusion protein), any of which can be used in an RNP of the present disclosure.

[0121] In some cases, a Cas9 protein comprises 4 motifs (as listed in Table 1), at least one with (or each with) amino acid sequences having 75% or more, 80% or more, 85% or more, 90% or more, 95% or more, 99% or more or 100% amino acid sequence identity to each of the 4 motifs listed in Table 1 (SEQ ID NOs: 1-4), or to the corresponding portions in any of the amino acid sequences set forth as SEQ ID NOs: 6-816.

[0122] In some cases, the Cas9 polypeptide used in a composition or method of the present disclosure is a Staphylococcus aureus Cas9 (saCas9) polypeptide. In some cases, the saCas9 polypeptide comprises an amino acid sequence having at least 85%, at least 90%, at least 95%, at least 98%, at least 99%, or 100%, amino acid sequence identity to the saCas9 amino acid sequence depicted in FIG. 6 (SEQ ID NO: 1140).

[0123] In some cases, the Cas9 polypeptide used in a composition or method of the present disclosure is comprises an amino acid sequence having at least 50%, at least 55%, at least 60%, at least 65%, at least 70%, at least 75%, or at least 80%, amino acid sequence identity to the Streptococcus pyogenes Cas9 amino acid sequence depicted in FIG. 7 (SEQ ID NO:1141). In some cases, the Cas9 polypeptide used in a composition or method of the present disclosure is comprises an amino acid sequence having at least 85%, at least 90%, at least 95%, at least 98%, at least 99%, or 100%, amino acid sequence identity to the Streptococcus pyogenes Cas9 amino acid sequence depicted in FIG. 7 (SEQ ID NO:1141).

[0124] In some cases, a suitable Cas9 polypeptide is a high-fidelity (HF) Cas9 polypeptide. Kleinstiver et al. (2016) Nature 529:490. For example, amino acids N497, R661, Q695, and Q926 of the amino acid sequence depicted in FIG. 7 (SEQ ID NO:1141) are substituted, e.g., with alanine. For example, an HF Cas9 polypeptide can comprise an amino acid sequence having at least 90%, at least 95%, at least 98%, at least 99%, or 100%, amino acid sequence identity to the amino acid sequence depicted in FIG. 7 (SEQ ID NO:1141), where amino acids N497, R661, Q695, and Q926 are substituted, e.g., with alanine. For example, in some cases, an HF Cas9 polypeptide comprised the amino acid sequence depicted in FIG. 8 (SEQ ID NO: 1142).

[0125] In some cases, a suitable Cas9 polypeptide exhibits altered PAM specificity. See, e.g., Kleinstiver et al. (2015) Nature 523:481.

### Type V and Type VI CRISPR/Cas Endonucleases

[0126] In some cases, a genome targeting composition of the present disclosure includes a type V or type VI CRISPR/Cas endonuclease (i.e., the genome editing endonuclease is a type V or type VI CRISPR/Cas endonuclease) (e.g., Cpf1, C2c1, C2c2, C2c3). Type V and type VI CRISPR/Cas endonucleases are a type of class 2 CRISPR/Cas endonuclease. Examples of type V CRISPR/Cas endonucleases include but are not limited to: Cpf1, C2c1, and C2c3. An example of a type VI CRISPR/Cas endonuclease is C2c2. In some cases, a subject genome targeting composition includes a type V CRISPR/Cas endonuclease (e.g., Cpf1, C2c1, C2c3). In some cases, a Type V CRISPR/Cas endonuclease is a Cpf1 protein. In some cases, a subject genome targeting composition includes a type VI CRISPR/Cas endonuclease (e.g., C2c2).

[0127] Like type II CRISPR/Cas endonucleases, type V and VI CRISPR/Cas endonucleases form a complex with a corresponding guide RNA. The guide RNA provides target specificity to an endonuclease-guide RNA RNP complex by having a nucleotide sequence (a guide sequence) that is complementary to a sequence (the target site) of a target nucleic acid (as described elsewhere herein). The endonuclease of the complex provides the site-specific activity. In other words, the endonuclease is guided to a target site (e.g., stabilized at a target site) within a target nucleic acid sequence (e.g. a chromosomal sequence or an extrachromosomal sequence, e.g., an episomal sequence, a minicircle sequence, a mitochondrial sequence, a chloroplast sequence, etc.) by virtue of its association with the protein-binding segment of the guide RNA.

[0128] Examples and guidance related to type V and type VI CRISPR/Cas proteins (e.g., cpf1, C2c1, C2c2, and C2c3 guide RNAs) can be found in the art, for example, see Zetsche et al, Cell. 2015 Oct. 22; 163(3):759-71; Makarova et al, Nat Rev Microbiol. 2015 November; 13(11):722-36; and Shmakov et al., Mol Cell. 2015 Nov. 5; 60(3):385-97.

[0129] In some cases, the Type V or type VI CRISPR/Cas endonuclease (e.g., Cpf1, C2c1, C2c2, C2c3) is enzymatically active, e.g., the Type V or type VI CRISPR/Cas polypeptide, when bound to a guide RNA, cleaves a target nucleic acid. In some cases, the Type V or type VI CRISPR/Cas endonuclease (e.g., Cpf1, C2c1, C2c2, C2c3) exhibits reduced enzymatic activity relative to a corresponding wild-type a Type V or type VI CRISPR/Cas endonuclease (e.g., Cpf1, C2c1, C2c2, C2c3), and retains DNA binding activity.

[0130] In some cases a type V CRISPR/Cas endonuclease is a Cpf1 protein. In some cases, a Cpf1 protein comprises an amino acid sequence having at least 30%, at least 35%, at least 40%, at least 45%, at least 50%, at least 55%, at least 60%, at least 65%, at least 70%, at least 75%, at least 80%, at least 85%, at least 90%, at least 95%, at least 90%, or 100%, amino acid sequence identity to the Cpf1 amino acid sequence set forth in any of SEQ ID NOs: 1088-1092. In some cases, a Cpf1 protein comprises an amino acid sequence having at least 30%, at least 35%, at least 40%, at least 45%, at least 50%, at least 55%, at least 60%, at least 65%, at least 70%, at least 75%, at least 80%, at least 85%, at least 90%, at least 95%, at least 90%, or 100%, amino acid sequence identity to a contiguous stretch of from 100 amino acids to 200 amino acids (aa), from 200 aa to 400 aa, from 400 aa to 600 aa, from 600 aa to 800 aa, from 800 aa to 1000 aa, from 1000 aa to 1100 aa, from 1100 aa to 1200 aa, or from 1200 aa to 1300 aa, of the Cpf1 amino acid sequence set forth in any of SEQ ID NOs: 1088-1092.

[0131] In some cases, a Cpf1 protein comprises an amino acid sequence having at least 30%, at least 35%, at least 40%, at least 45%, at least 50%, at least 55%, at least 60%, at least 65%, at least 70%, at least 75%, at least 80%, at least 85%, at least 90%, at least 95%, at least 90%, or 100%, amino acid sequence identity to the RuvCI domain of the Cpf1 amino acid sequence set forth in any of SEQ ID NOs: 1088-1092. In some cases, a Cpf1 protein comprises an amino acid sequence having at least 30%, at least 35%, at least 40%, at least 45%, at least 50%, at least 55%, at least 60%, at least 65%, at least 70%, at least 75%, at least 80%, at least 85%, at least 90%, at least 95%, at least 90%, or 100%, amino acid sequence identity to the RuvCII domain of the Cpf1 amino acid sequence set forth in any of SEQ ID NOs: 1088-1092. In some cases, a Cpf1 protein comprises an amino acid sequence having at least 30%, at least 35%, at least 40%, at least 45%, at least 50%, at least 55%, at least 60%, at least 65%, at least 70%, at least 75%, at least 80%, at least 85%, at least 90%, at least 95%, at least 90%, or 100%, amino acid sequence identity to the RuvCIII domain of the Cpf1 amino acid sequence set forth in any of SEQ ID NOs: 1088-1092. In some cases, a Cpf1 protein comprises an amino acid sequence having at least 30%, at least 35%, at least 40%, at least 45%, at least 50%, at least 55%, at least 60%, at least 65%, at least 70%, at least 75%, at least 80%, at least 85%, at least 90%, at least 95%, at least 90%, or 100%, amino acid sequence identity to the RuvCI, RuvCII, and RuvCIII domains of the Cpf1 amino acid sequence set forth in any of SEQ ID NOs: 1088-1092.

[0132] In some cases, the Cpf1 protein exhibits reduced enzymatic activity relative to a wild-type Cpf1 protein (e.g., relative to a Cpf1 protein comprising the amino acid sequence set forth in any of SEQ ID NOs: 1088-1092), and retains DNA binding activity. In some cases, a Cpf1 protein comprises an amino acid sequence having at least 30%, at least 35%, at least 40%, at least 45%, at least 50%, at least 55%, at least 60%, at least 65%, at least 70%, at least 75%, at least 80%, at least 85%, at least 90%, at least 95%, at least 90%, or 100%, amino acid sequence identity to the Cpf1 amino acid sequence set forth in any of SEQ ID NOs: 1088-1092; and comprises an amino acid substitution (e.g., a D-A substitution) at an amino acid residue corresponding to amino acid 917 of the Cpf1 amino acid sequence set forth in SEQ ID NO: 1088. In some cases, a Cpf1 protein comprises an amino acid sequence having at least 30%, at least 35%, at least 40%, at least 45%, at least 50%, at least 55%, at least 60%, at least 65%, at least 70%, at least 75%, at least 80%, at least 85%, at least 90%, at least 95%, at least 90%, or 100%, amino acid sequence identity to the Cpf1 amino acid sequence set forth in any of SEQ ID NOs: 1088-1092; and comprises an amino acid substitution (e.g., an E→A substitution) at an amino acid residue corresponding to amino acid 1006 of the Cpf1 amino acid sequence set forth in SEQ ID NO: 1088. In some cases, a Cpf1 protein comprises an amino acid sequence having at least 30%, at least 35%, at least 40%, at least 45%, at least 50%, at least 55%, at least 60%, at least 65%, at least 70%, at least 75%, at least 80%, at least 85%, at least 90%, at least 95%, at least 90%, or 100%, amino acid sequence identity to the Cpf1 amino acid sequence set forth in any of SEQ ID NOs: 1088-1092; and comprises an amino acid substitution (e.g., a D→A substitution) at an amino acid residue corresponding to amino acid 1255 of the Cpf1 amino acid sequence set forth in SEQ ID NO: 1088.

[0133] In some cases, a suitable Cpf1 protein comprises an amino acid sequence having at least 30%, at least 35%, at least 40%, at least 45%, at least 50%, at least 55%, at least 60%, at least 65%, at least 70%, at least 75%, at least 80%, at least 85%, at least 90%, at least 95%, at least 90%, or 100%, amino acid sequence identity to the Cpf1 amino acid sequence set forth in any of SEQ ID NOs: 1088-1092.

[0134] In some cases a type V CRISPR/Cas endonuclease is a C2c1 protein (examples include those set forth as SEQ ID NOs: 1112-1119). In some cases, a C2c1 protein comprises an amino acid sequence having at least 30%, at least 35%, at least 40%, at least 45%, at least 50%, at least 55%, at least 60%, at least 65%, at least 70%, at least 75%, at least 80%, at least 85%, at least 90%, at least 95%, at least 90%, or 100%, amino acid sequence identity to the C2c1 amino acid sequence set forth in any of SEQ ID NOs: 1112-1119. In some cases, a C2c1 protein comprises an amino acid sequence having at least 30%, at least 35%, at least 40%, at least 45%, at least 50%, at least 55%, at least 60%, at least 65%, at least 70%, at least 75%, at least 80%, at least 85%, at least 90%, at least 95%, at least 90%, or 100%, amino acid sequence identity to a contiguous stretch of from 100 amino acids to 200 amino acids (aa), from 200 aa to 400 aa, from 400 aa to 600 aa, from 600 aa to 800 aa, from 800 aa to 1000 aa, from 1000 aa to 1100 aa, from 1100 aa to 1200 aa, or from 1200 aa to 1300 aa, of the C2c1 amino acid sequence set forth in any of SEQ ID NOs: 1112-1119.

[0135] In some cases, a C2c1 protein comprises an amino acid sequence having at least 30%, at least 35%, at least 40%, at least 45%, at least 50%, at least 55%, at least 60%, at least 65%, at least 70%, at least 75%, at least 80%, at least 85%, at least 90%, at least 95%, at least 90%, or 100%, amino acid sequence identity to the RuvCI domain of the C2c1 amino acid sequences set forth in any of SEQ ID NOs: 1112-1119). In some cases, a C2c1 protein comprises an amino acid sequence having at least 30%, at least 35%, at least 40%, at least 45%, at least 50%, at least 55%, at least 60%, at least 65%, at least 70%, at least 75%, at least 80%, at least 85%, at least 90%, at least 95%, at least 90%, or 100%, amino acid sequence identity to the RuvCII domain of the C2c1 amino acid sequence set forth in any of SEQ ID NOs: 1112-1119. In some cases, a C2c1 protein comprises an amino acid sequence having at least 30%, at least 35%, at least 40%, at least 45%, at least 50%, at least 55%, at least 60%, at least 65%, at least 70%, at least 75%, at least 80%, at least 85%, at least 90%, at least 95%, at least 90%, or 100%, amino acid sequence identity to the RuvCIII domain of the C2c1 amino acid sequence set forth in any of SEQ ID NOs: 1112-1119. In some cases, a C2c1 protein comprises an amino acid sequence having at least 30%, at least 35%, at least 40%, at least 45%, at least 50%, at least 55%, at least 60%, at least 65%, at least 70%, at least 75%, at least 80%, at least 85%, at least 90%, at least 95%, at least 90%, or 100%, amino acid sequence identity to the RuvCI, RuvCII, and RuvCIII domains of the C2c1 amino acid sequence set forth in any of SEQ ID NOs: 1112-1119.

[0136] In some cases, the C2c1 protein exhibits reduced enzymatic activity relative to a wild-type C2c1 protein (e.g., relative to a C2c1 protein comprising the amino acid sequence set forth in any of SEQ ID NOs: 1112-1119), and retains DNA binding activity. In some cases, a suitable C2c1 protein comprises an amino acid sequence having at least 30%, at least 35%, at least 40%, at least 45%, at least 50%, at least 55%, at least 60%, at least 65%, at least 70%, at least 75%, at least 80%, at least 85%, at least 90%, at least 95%, at least 90%, or 100%, amino acid sequence identity to the C2c1 amino acid sequence set forth in any of SEQ ID NOs: 1112-1119.

[0137] In some cases a type V CRISPR/Cas endonuclease is a C2c3 protein (examples include those set forth as SEQ ID NOs: 1120-1123). In some cases, a C2c3 protein comprises an amino acid sequence having at least 30%, at least 35%, at least 40%, at least 45%, at least 50%, at least 55%, at least 60%, at least 65%, at least 70%, at least 75%, at least 80%, at least 85%, at least 90%, at least 95%, at least 90%, or 100%, amino acid sequence identity to the C2c3 amino acid sequence set forth in any of SEQ ID NOs: 1120-1123. In some cases, a C2c3 protein comprises an amino acid sequence having at least 30%, at least 35%, at least 40%, at least 45%, at least 50%, at least 55%, at least 60%, at least 65%, at least 70%, at least 75%, at least 80%, at least 85%, at least 90%, at least 95%, at least 90%, or 100%, amino acid sequence identity to a contiguous stretch of from 100 amino acids to 200 amino acids (aa), from 200 aa to 400 aa, from 400 aa to 600 aa, from 600 aa to 800 aa, from 800 aa to 1000 aa, from 1000 aa to 1100 aa, from 1100 aa to 1200 aa, or from 1200 aa to 1300 aa, of the C2c3 amino acid sequence set forth in any of SEQ ID NOs: 1120-1123.

[0138] In some cases, a C2c3 protein comprises an amino acid sequence having at least 30%, at least 35%, at least 40%, at least 45%, at least 50%, at least 55%, at least 60%, at least 65%, at least 70%, at least 75%, at least 80%, at least 85%, at least 90%, at least 95%, at least 90%, or 100%, amino acid sequence identity to the RuvCI domain of the C2c3 amino acid sequence set forth in any of SEQ ID NOs: 1120-1123. In some cases, a C2c3 protein comprises an amino acid sequence having at least 30%, at least 35%, at least 40%, at least 45%, at least 50%, at least 55%, at least 60%, at least 65%, at least 70%, at least 75%, at least 80%, at least 85%, at least 90%, at least 95%, at least 90%, or 100%, amino acid sequence identity to the RuvCII domain of the C2c3 amino acid sequence set forth in any of SEQ ID NOs: 1120-1123. In some cases, a C2c3 protein comprises an amino acid sequence having at least 30%, at least 35%, at least 40%, at least 45%, at least 50%, at least 55%, at least 60%, at least 65%, at least 70%, at least 75%, at least 80%, at least 85%, at least 90%, at least 95%, at least 90%, or 100%, amino acid sequence identity to the RuvCIII domain of the C2c3 amino acid sequence set forth in any of SEQ ID NOs: 1120-1123. In some cases, a C2c3 protein comprises an amino acid sequence having at least 30%, at least 35%, at least 40%, at least 45%, at least 50%, at least 55%, at least 60%, at least 65%, at least 70%, at least 75%, at least 80%, at least 85%, at least 90%, at least 95%, at least 90%, or 100%, amino acid sequence identity to the RuvCI, RuvCII, and RuvCIII domains of the C2c3 amino acid sequence set forth in any of SEQ ID NOs: 1120-1123.

[0139] In some cases, the C2c3 protein exhibits reduced enzymatic activity relative to a wild-type C2c3 protein (e.g., relative to a C2c3 protein comprising the amino acid sequence set forth in any of SEQ ID NOs: 1120-1123), and retains DNA binding activity. In some cases, a suitable C2c3 protein comprises an amino acid sequence having at least 30%, at least 35%, at least 40%, at least 45%, at least 50%, at least 55%, at least 60%, at least 65%, at least 70%, at least 75%, at least 80%, at least 85%, at least 90%, at least 95%, at least 90%, or 100%, amino acid sequence identity to the C2c3 amino acid sequence set forth in any of SEQ ID NOs: 1120-1123.

[0140] In some cases a type VI CRISPR/Cas endonuclease is a C2c2 protein (examples include those set forth as SEQ ID NOs: 1124-1135). In some cases, a C2c2 protein comprises an amino acid sequence having at least 30%, at least 35%, at least 40%, at least 45%, at least 50%, at least 55%, at least 60%, at least 65%, at least 70%, at least 75%, at least 80%, at least 85%, at least 90%, at least 95%, at least 90%, or 100%, amino acid sequence identity to the C2c2 amino acid sequence set forth in any of SEQ ID NOs: 1124-1135. In some cases, a C2c2 protein comprises an amino acid sequence having at least 30%, at least 35%, at least 40%, at least 45%, at least 50%, at least 55%, at least 60%, at least 65%, at least 70%, at least 75%, at least 80%, at least 85%, at least 90%, at least 95%, at least 90%, or 100%, amino acid sequence identity to a contiguous stretch of from 100 amino acids to 200 amino acids (aa), from 200 aa to 400 aa, from 400 aa to 600 aa, from 600 aa to 800 aa, from 800 aa to 1000 aa, from 1000 aa to 1100 aa, from 1100 aa to 1200 aa, or from 1200 aa to 1300 aa, of the C2c2 amino acid sequence set forth in any of SEQ ID NOs: 1124-1135.

[0141] In some cases, a C2c2 protein comprises an amino acid sequence having at least 30%, at least 35%, at least 40%, at least 45%, at least 50%, at least 55%, at least 60%, at least 65%, at least 70%, at least 75%, at least 80%, at least 85%, at least 90%, at least 95%, at least 90%, or 100%, amino acid sequence identity to the RuvCI domain of the C2c2 amino acid sequence set forth in any of SEQ ID NOs: 1124-1135. In some cases, a C2c2 protein comprises an amino acid sequence having at least 30%, at least 35%, at least 40%, at least 45%, at least 50%, at least 55%, at least 60%, at least 65%, at least 70%, at least 75%, at least 80%, at least 85%, at least 90%, at least 95%, at least 90%, or 100%, amino acid sequence identity to the RuvCII domain of the C2c2 amino acid sequence set forth in any of SEQ ID NOs: 1124-1135. In some cases, a C2c2 protein comprises an amino acid sequence having at least 30%, at least 35%, at least 40%, at least 45%, at least 50%, at least 55%, at least 60%, at least 65%, at least 70%, at least 75%, at least 80%, at least 85%, at least 90%, at least 95%, at least 90%, or 100%, amino acid sequence identity to the RuvCIII domain of the C2c2 amino acid sequence set forth in any of SEQ ID NOs: 1124-1135. In some cases, a C2c2 protein comprises an amino acid sequence having at least 30%, at least 35%, at least 40%, at least 45%, at least 50%, at least 55%, at least 60%, at least 65%, at least 70%, at least 75%, at least 80%, at least 85%, at least 90%, at least 95%, at least 90%, or 100%, amino acid sequence identity to the RuvCI, RuvCII, and RuvCIII domains of the C2c2 amino acid sequence set forth in any of SEQ ID NOs: 1124-1135.

[0142] In some cases, the C2c2 protein exhibits reduced enzymatic activity relative to a wild-type C2c2 protein (e.g., relative to a C2c2 protein comprising the amino acid sequence set forth in any of SEQ ID NOs: 1124-1135), and retains DNA binding activity. In some cases, a suitable C2c2 protein comprises an amino acid sequence having at least 30%, at least 35%, at least 40%, at least 45%, at least 50%, at least 55%, at least 60%, at least 65%, at least 70%, at least 75%, at least 80%, at least 85%, at least 90%, at least 95%, at least 90%, or 100%, amino acid sequence identity to the C2c2 amino acid sequence set forth in any of SEQ ID NOs: 1124-1135.

### Guide RNA (for CRISPR/Cas Endonucleases)

[0143] A nucleic acid molecule that binds to a class 2 CRISPR/Cas endonuclease (e.g., a Cas9 protein; a type V or type VI CRISPR/Cas protein; a Cpf1 protein; etc.) and targets the complex to a specific location within a target nucleic acid is referred to herein as a “guide RNA” or “CRISPR/Cas guide nucleic acid” or “CRISPR/Cas guide RNA.”

[0144] A guide RNA provides target specificity to the complex (the RNP complex) by including a targeting segment, which includes a guide sequence (also referred to herein as a targeting sequence), which is a nucleotide sequence that is complementary to a sequence of a target nucleic acid.

[0145] A guide RNA can be referred to by the protein to which it corresponds. For example, when the class 2 CRISPR/Cas endonuclease is a Cas9 protein, the corresponding guide RNA can be referred to as a “Cas9 guide RNA.” Likewise, as another example, when the class 2 CRISPR/Cas endonuclease is a Cpf1 protein, the corresponding guide RNA can be referred to as a “Cpf1 guide RNA.”

[0146] In some embodiments, a guide RNA includes two separate nucleic acid molecules: an “activator” and a “targeter” and is referred to herein as a “dual guide RNA”, a “double-molecule guide RNA”, a “two-molecule guide RNA”, or a “dgRNA.” In some embodiments, the guide RNA is one molecule (e.g., for some class 2 CRISPR/Cas proteins, the corresponding guide RNA is a single molecule; and in some cases, an activator and targeter are covalently linked to one another, e.g., via intervening nucleotides), and the guide RNA is referred to as a “single guide RNA”, a “single-molecule guide RNA,” a “one-molecule guide RNA”, or simply “sgRNA.”

### Cas9 Guide RNA

[0147] A nucleic acid molecule that binds to a Cas9 protein and targets the complex to a specific location within a target nucleic acid is referred to herein as a “Cas9 guide RNA.”

[0148] A Cas9 guide RNA (can be said to include two segments, a first segment (referred to herein as a “targeting segment”); and a second segment (referred to herein as a “protein-binding segment”). By “segment” it is meant a segment/section/region of a molecule, e.g., a contiguous stretch of nucleotides in a nucleic acid molecule. A segment can also mean a region/section of a complex such that a segment may comprise regions of more than one molecule.

[0149] The first segment (targeting segment) of a Cas9 guide RNA includes a nucleotide sequence (a guide sequence) that is complementary to (and therefore hybridizes with) a specific sequence (a target site) within a target nucleic acid (e.g., a target ssRNA, a target ssDNA, the complementary strand of a double stranded target DNA, etc.). The protein-binding segment (or “protein-binding sequence”) interacts with (binds to) a Cas9 polypeptide. The protein-binding segment of a subject Cas9 guide RNA includes two complementary stretches of nucleotides that hybridize to one another to form a double stranded RNA duplex (dsRNA duplex). Site-specific binding and/or cleavage of a target nucleic acid (e.g., genomic DNA) can occur at locations (e.g., target sequence of a target locus) determined by base-pairing complementarity between the Cas9 guide RNA (the guide sequence of the Cas9 guide RNA) and the target nucleic acid.

[0150] A Cas9 guide RNA and a Cas9 protein form a complex (e.g., bind via non-covalent interactions). The Cas9 guide RNA provides target specificity to the complex by including a targeting segment, which includes a guide sequence (a nucleotide sequence that is complementary to a sequence of a target nucleic acid). The Cas9 protein of the complex provides the site-specific activity (e.g., cleavage activity or an activity provided by the Cas9 protein when the Cas9 protein is a Cas9 fusion polypeptide, i.e., has a fusion partner). In other words, the Cas9 protein is guided to a target nucleic acid sequence (e.g. a target sequence in a chromosomal nucleic acid, e.g., a chromosome; a target sequence in an extrachromosomal nucleic acid, e.g. an episomal nucleic acid, a minicircle, an ssRNA, an ssDNA, etc.; a target sequence in a mitochondrial nucleic acid; a target sequence in a chloroplast nucleic acid; a target sequence in a plasmid; a target sequence in a viral nucleic acid; etc.) by virtue of its association with the Cas9 guide RNA.

[0151] The “guide sequence” also referred to as the “targeting sequence” of a Cas9 guide RNA can be modified so that the Cas9 guide RNA can target a Cas9 protein to any desired sequence of any desired target nucleic acid, with the exception that the protospacer adjacent motif (PAM) sequence can be taken into account. Thus, for example, a Cas9 guide RNA can have a targeting segment with a sequence (a guide sequence) that has complementarity with (e.g., can hybridize to) a sequence in a nucleic acid in a eukaryotic cell, e.g., a viral nucleic acid, a eukaryotic nucleic acid (e.g., a eukaryotic chromosome, chromosomal sequence, a eukaryotic RNA, etc.), and the like.

[0152] In some embodiments, a Cas9 guide RNA includes two separate nucleic acid molecules: an “activator” and a “targeter” and is referred to herein as a “dual Cas9 guide RNA”, a “double-molecule Cas9 guide RNA”, or a “two-molecule Cas9 guide RNA” a “dual guide RNA”, or a “dgRNA.” In some embodiments, the activator and targeter are covalently linked to one another (e.g., via intervening nucleotides) and the guide RNA is referred to as a “single guide RNA”, a “Cas9 single guide RNA”, a “single-molecule Cas9 guide RNA,” or a “one-molecule Cas9 guide RNA”, or simply “sgRNA.”

[0153] A Cas9 guide RNA comprises a crRNA-like (“CRISPR RNA”/“targeter”/“crRNA”/“crRNA repeat”) molecule and a corresponding tracrRNA-like (“trans-acting CRISPR RNA”/“activator”/“tracrRNA”) molecule. A crRNA-like molecule (targeter) comprises both the targeting segment (single stranded) of the Cas9 guide RNA and a stretch (“duplex-forming segment”) of nucleotides that forms one half of the dsRNA duplex of the protein-binding segment of the Cas9 guide RNA. A corresponding tracrRNA-like molecule (activator/tracrRNA) comprises a stretch of nucleotides (duplex-forming segment) that forms the other half of the dsRNA duplex of the protein-binding segment of the guide nucleic acid. In other words, a stretch of nucleotides of a crRNA-like molecule are complementary to and hybridize with a stretch of nucleotides of a tracrRNA-like molecule to form the dsRNA duplex of the protein-binding domain of the Cas9 guide RNA. As such, each targeter molecule can be said to have a corresponding activator molecule (which has a region that hybridizes with the targeter). The targeter molecule additionally provides the targeting segment. Thus, a targeter and an activator molecule (as a corresponding pair) hybridize to form a Cas9 guide RNA. The exact sequence of a given crRNA or tracrRNA molecule is characteristic of the species in which the RNA molecules are found. A subject dual Cas9 guide RNA can include any corresponding activator and targeter pair.

[0154] The term “activator” or “activator RNA” is used herein to mean a tracrRNA-like molecule (tracrRNA: “trans-acting CRISPR RNA”) of a Cas9 dual guide RNA (and therefore of a Cas9 single guide RNA when the “activator” and the “targeter” are linked together by, e.g., intervening nucleotides). Thus, for example, a Cas9 guide RNA (dgRNA or sgRNA) comprises an activator sequence (e.g., a tracrRNA sequence). A tracr molecule (a tracrRNA) is a naturally existing molecule that hybridizes with a CRISPR RNA molecule (a crRNA) to form a Cas9 dual guide RNA. The term “activator” is used herein to encompass naturally existing tracrRNAs, but also to encompass tracrRNAs with modifications (e.g., truncations, sequence variations, base modifications, backbone modifications, linkage modifications, etc.) where the activator retains at least one function of a tracrRNA (e.g., contributes to the dsRNA duplex to which Cas9 protein binds). In some cases the activator provides one or more stem loops that can interact with Cas9 protein. An activator can be referred to as having a tracr sequence (tracrRNA sequence) and in some cases is a tracrRNA, but the term “activator” is not limited to naturally existing tracrRNAs.

[0155] The term “targeter” or “targeter RNA” is used herein to refer to a crRNA-like molecule (crRNA: “CRISPR RNA”) of a Cas9 dual guide RNA (and therefore of a Cas9 single guide RNA when the “activator” and the “targeter” are linked together, e.g., by intervening nucleotides). Thus, for example, a Cas9 guide RNA (dgRNA or sgRNA) comprises a targeting segment (which includes nucleotides that hybridize with (are complementary to) a target nucleic acid, and a duplex-forming segment (e.g., a duplex forming segment of a crRNA, which can also be referred to as a crRNA repeat). Because the sequence of a targeting segment (the segment that hybridizes with a target sequence of a target nucleic acid) of a targeter is modified by a user to hybridize with a desired target nucleic acid, the sequence of a targeter will often be a non-naturally occurring sequence. However, the duplex-forming segment of a targeter (described in more detail below), which hybridizes with the duplex-forming segment of an activator, can include a naturally existing sequence (e.g., can include the sequence of a duplex-forming segment of a naturally existing crRNA, which can also be referred to as a crRNA repeat). Thus, the term targeter is used herein to distinguish from naturally occurring crRNAs, despite the fact that part of a targeter (e.g., the duplex-forming segment) often includes a naturally occurring sequence from a crRNA. However, the term “targeter” encompasses naturally occurring crRNAs.

[0156] A Cas9 guide RNA can also be said to include 3 parts: (i) a targeting sequence (a nucleotide sequence that hybridizes with a sequence of the target nucleic acid); (ii) an activator sequence (as described above)(in some cases, referred to as a tracr sequence); and (iii) a sequence that hybridizes to at least a portion of the activator sequence to form a double stranded duplex. A targeter has (i) and (iii); while an activator has (ii).

[0157] A Cas9 guide RNA (e.g. a dual guide RNA or a single guide RNA) can be comprised of any corresponding activator and targeter pair. In some cases, the duplex forming segments can be swapped between the activator and the targeter. In other words, in some cases, the targeter includes a sequence of nucleotides from a duplex forming segment of a tracrRNA (which sequence would normally be part of an activator) while the activator includes a sequence of nucleotides from a duplex forming segment of a crRNA (which sequence would normally be part of a targeter).

[0158] As noted above, a targeter comprises both the targeting segment (single stranded) of the Cas9 guide RNA and a stretch (“duplex-forming segment”) of nucleotides that forms one half of the dsRNA duplex of the protein-binding segment of the Cas9 guide RNA. A corresponding tracrRNA-like molecule (activator) comprises a stretch of nucleotides (a duplex-forming segment) that forms the other half of the dsRNA duplex of the protein-binding segment of the Cas9 guide RNA. In other words, a stretch of nucleotides of the targeter is complementary to and hybridizes with a stretch of nucleotides of the activator to form the dsRNA duplex of the protein-binding segment of a Cas9 guide RNA. As such, each targeter can be said to have a corresponding activator (which has a region that hybridizes with the targeter). The targeter molecule additionally provides the targeting segment. Thus, a targeter and an activator (as a corresponding pair) hybridize to form a Cas9 guide RNA. The particular sequence of a given naturally existing crRNA or tracrRNA molecule is characteristic of the species in which the RNA molecules are found. Examples of suitable activator and targeter are well known in the art.

[0159] A Cas9 guide RNA (e.g. a dual guide RNA or a single guide RNA) can be comprised of any corresponding activator and targeter pair. Non-limiting examples of nucleotide sequences that can be included in a Cas9 guide RNA (dgRNA or sgRNA) include sequences set forth in SEQ ID NOs: 827-1075, or complements thereof. For example, in some cases, sequences from SEQ ID NOs: 827-957 (which are from tracrRNAs) or complements thereof, can pair with sequences from SEQ ID NOs: 964-1075 (which are from crRNAs), or complements thereof, to form a dsRNA duplex of a protein binding segment.

### Targeting Segment of a Cas9 Guide RNA

[0160] The first segment of a subject guide nucleic acid includes a guide sequence (i.e., a targeting sequence)(a nucleotide sequence that is complementary to a sequence (a target site) in a target nucleic acid). In other words, the targeting segment of a subject guide nucleic acid can interact with a target nucleic acid (e.g., double stranded DNA (dsDNA)) in a sequence-specific manner via hybridization (i.e., base pairing). As such, the nucleotide sequence of the targeting segment may vary (depending on the target) and can determine the location within the target nucleic acid that the Cas9 guide RNA and the target nucleic acid will interact. The targeting segment of a Cas9 guide RNA can be modified (e.g., by genetic engineering)/designed to hybridize to any desired sequence (target site) within a target nucleic acid (e.g., a eukaryotic target nucleic acid such as genomic DNA).

[0161] The targeting segment can have a length of 7 or more nucleotides (nt) (e.g., 8 or more, 9 or more, 10 or more, 12 or more, 15 or more, 20 or more, 25 or more, 30 or more, or 40 or more nucleotides). In some cases, the targeting segment can have a length of from 7 to 100 nucleotides (nt) (e.g., from 7 to 80 nt, from 7 to 60 nt, from 7 to 40 nt, from 7 to 30 nt, from 7 to 25 nt, from 7 to 22 nt, from 7 to 20 nt, from 7 to 18 nt, from 8 to 80 nt, from 8 to 60 nt, from 8 to 40 nt, from 8 to 30 nt, from 8 to 25 nt, from 8 to 22 nt, from 8 to 20 nt, from 8 to 18 nt, from 10 to 100 nt, from 10 to 80 nt, from 10 to 60 nt, from 10 to 40 nt, from 10 to 30 nt, from 10 to 25 nt, from 10 to 22 nt, from 10 to 20 nt, from 10 to 18 nt, from 12 to 100 nt, from 12 to 80 nt, from 12 to 60 nt, from 12 to 40 nt, from 12 to 30 nt, from 12 to 25 nt, from 12 to 22 nt, from 12 to 20 nt, from 12 to 18 nt, from 14 to 100 nt, from 14 to 80 nt, from 14 to 60 nt, from 14 to 40 nt, from 14 to 30 nt, from 14 to 25 nt, from 14 to 22 nt, from 14 to 20 nt, from 14 to 18 nt, from 16 to 100 nt, from 16 to 80 nt, from 16 to 60 nt, from 16 to 40 nt, from 16 to 30 nt, from 16 to 25 nt, from 16 to 22 nt, from 16 to 20 nt, from 16 to 18 nt, from 18 to 100 nt, from 18 to 80 nt, from 18 to 60 nt, from 18 to 40 nt, from 18 to 30 nt, from 18 to 25 nt, from 18 to 22 nt, or from 18 to 20 nt).

[0162] The nucleotide sequence (the targeting sequence) of the targeting segment that is complementary to a nucleotide sequence (target site) of the target nucleic acid can have a length of 10 nt or more. For example, the targeting sequence of the targeting segment that is complementary to a target site of the target nucleic acid can have a length of 12 nt or more, 15 nt or more, 18 nt or more, 19 nt or more, or 20 nt or more. In some cases, the nucleotide sequence (the targeting sequence) of the targeting segment that is complementary to a nucleotide sequence (target site) of the target nucleic acid has a length of 12 nt or more. In some cases, the nucleotide sequence (the targeting sequence) of the targeting segment that is complementary to a nucleotide sequence (target site) of the target nucleic acid has a length of 18 nt or more.

[0163] For example, the targeting sequence of the targeting segment that is complementary to a target sequence of the target nucleic acid can have a length of from 10 to 100 nucleotides (nt) (e.g., from 10 to 90 nt, from 10 to 75 nt, from 10 to 60 nt, from 10 to 50 nt, from 10 to 35 nt, from 10 to 30 nt, from 10 to 25 nt, from 10 to 22 nt, from 10 to 20 nt, from 12 to 100 nt, from 12 to 90 nt, from 12 to 75 nt, from 12 to 60 nt, from 12 to 50 nt, from 12 to 35 nt, from 12 to 30 nt, from 12 to 25 nt, from 12 to 22 nt, from 12 to 20 nt, from 15 to 100 nt, from 15 to 90 nt, from 15 to 75 nt, from 15 to 60 nt, from 15 to 50 nt, from 15 to 35 nt, from 15 to 30 nt, from 15 to 25 nt, from 15 to 22 nt, from 15 to 20 nt, from 17 to 100 nt, from 17 to 90 nt, from 17 to 75 nt, from 17 to 60 nt, from 17 to 50 nt, from 17 to 35 nt, from 17 to 30 nt, from 17 to 25 nt, from 17 to 22 nt, from 17 to 20 nt, from 18 to 100 nt, from 18 to 90 nt, from 18 to 75 nt, from 18 to 60 nt, from 18 to 50 nt, from 18 to 35 nt, from 18 to 30 nt, from 18 to 25 nt, from 18 to 22 nt, or from 18 to 20 nt). In some cases, the targeting sequence of the targeting segment that is complementary to a target sequence of the target nucleic acid has a length of from 15 nt to 30 nt. In some cases, the targeting sequence of the targeting segment that is complementary to a target sequence of the target nucleic acid has a length of from 15 nt to 25 nt. In some cases, the targeting sequence of the targeting segment that is complementary to a target sequence of the target nucleic acid has a length of from 18 nt to 30 nt. In some cases, the targeting sequence of the targeting segment that is complementary to a target sequence of the target nucleic acid has a length of from 18 nt to 25 nt. In some cases, the targeting sequence of the targeting segment that is complementary to a target sequence of the target nucleic acid has a length of from 18 nt to 22 nt. In some cases, the targeting sequence of the targeting segment that is complementary to a target site of the target nucleic acid is 20 nucleotides in length. In some cases, the targeting sequence of the targeting segment that is complementary to a target site of the target nucleic acid is 19 nucleotides in length.

[0164] The percent complementarity between the targeting sequence (guide sequence) of the targeting segment and the target site of the target nucleic acid can be 60% or more (e.g., 65% or more, 70% or more, 75% or more, 80% or more, 85% or more, 90% or more, 95% or more, 97% or more, 98% or more, 99% or more, or 100%). In some cases, the percent complementarity between the targeting sequence of the targeting segment and the target site of the target nucleic acid is 100% over the seven contiguous 5′-most nucleotides of the target site of the target nucleic acid. In some cases, the percent complementarity between the targeting sequence of the targeting segment and the target site of the target nucleic acid is 60% or more over about 20 contiguous nucleotides. In some cases, the percent complementarity between the targeting sequence of the targeting segment and the target site of the target nucleic acid is 100% over the fourteen contiguous 5′-most nucleotides of the target site of the target nucleic acid and as low as 0% or more over the remainder. In such a case, the targeting sequence can be considered to be 14 nucleotides in length. In some cases, the percent complementarity between the targeting sequence of the targeting segment and the target site of the target nucleic acid is 100% over the seven contiguous 5′-most nucleotides of the target site of the target nucleic acid and as low as 0% or more over the remainder. In such a case, the targeting sequence can be considered to be 20 nucleotides in length.

[0165] In some cases, the percent complementarity between the targeting sequence of the targeting segment and the target site of the target nucleic acid is 100% over the 7 contiguous 5′-most nucleotides of the target site of the target nucleic acid (which can be complementary to the 3′-most nucleotides of the targeting sequence of the Cas9 guide RNA). In some cases, the percent complementarity between the targeting sequence of the targeting segment and the target site of the target nucleic acid is 100% over the 8 contiguous 5′-most nucleotides of the target site of the target nucleic acid (which can be complementary to the 3′-most nucleotides of the targeting sequence of the Cas9 guide RNA). In some cases, the percent complementarity between the targeting sequence of the targeting segment and the target site of the target nucleic acid is 100% over the 9 contiguous 5′-most nucleotides of the target site of the target nucleic acid (which can be complementary to the 3′-most nucleotides of the targeting sequence of the Cas9 guide RNA). In some cases, the percent complementarity between the targeting sequence of the targeting segment and the target site of the target nucleic acid is 100% over the 10 contiguous 5′-most nucleotides of the target site of the target nucleic acid (which can be complementary to the 3′-most nucleotides of the targeting sequence of the Cas9 guide RNA). In some cases, the percent complementarity between the targeting sequence of the targeting segment and the target site of the target nucleic acid is 100% over the 17 contiguous 5′-most nucleotides of the target site of the target nucleic acid (which can be complementary to the 3′-most nucleotides of the targeting sequence of the Cas9 guide RNA). In some cases, the percent complementarity between the targeting sequence of the targeting segment and the target site of the target nucleic acid is 100% over the 18 contiguous 5′-most nucleotides of the target site of the target nucleic acid (which can be complementary to the 3′-most nucleotides of the targeting sequence of the Cas9 guide RNA). In some cases, the percent complementarity between the targeting sequence of the targeting segment and the target site of the target nucleic acid is 60% or more (e.g., e.g., 65% or more, 70% or more, 75% or more, 80% or more, 85% or more, 90% or more, 95% or more, 97% or more, 98% or more, 99% or more, or 100%) over about 20 contiguous nucleotides.

[0166] In some cases, the percent complementarity between the targeting sequence of the targeting segment and the target site of the target nucleic acid is 100% over the 7 contiguous 5′-most nucleotides of the target site of the target nucleic acid and as low as 0% or more over the remainder. In such a case, the targeting sequence can be considered to be 7 nucleotides in length. In some cases, the percent complementarity between the targeting sequence of the targeting segment and the target site of the target nucleic acid is 100% over the 8 contiguous 5′-most nucleotides of the target site of the target nucleic acid and as low as 0% or more over the remainder. In such a case, the targeting sequence can be considered to be 8 nucleotides in length. In some cases, the percent complementarity between the targeting sequence of the targeting segment and the target site of the target nucleic acid is 100% over the 9 contiguous 5′-most nucleotides of the target site of the target nucleic acid and as low as 0% or more over the remainder. In such a case, the targeting sequence can be considered to be 9 nucleotides in length. In some cases, the percent complementarity between the targeting sequence of the targeting segment and the target site of the target nucleic acid is 100% over the 10 contiguous 5′-most nucleotides of the target site of the target nucleic acid and as low as 0% or more over the remainder. In such a case, the targeting sequence can be considered to be 10 nucleotides in length. In some cases, the percent complementarity between the targeting sequence of the targeting segment and the target site of the target nucleic acid is 100% over the 11 contiguous 5′-most nucleotides of the target site of the target nucleic acid and as low as 0% or more over the remainder. In such a case, the targeting sequence can be considered to be 11 nucleotides in length. In some cases, the percent complementarity between the targeting sequence of the targeting segment and the target site of the target nucleic acid is 100% over the 12 contiguous 5′-most nucleotides of the target site of the target nucleic acid and as low as 0% or more over the remainder. In such a case, the targeting sequence can be considered to be 12 nucleotides in length. In some cases, the percent complementarity between the targeting sequence of the targeting segment and the target site of the target nucleic acid is 100% over the 13 contiguous 5′-most nucleotides of the target site of the target nucleic acid and as low as 0% or more over the remainder. In such a case, the targeting sequence can be considered to be 13 nucleotides in length. In some cases, the percent complementarity between the targeting sequence of the targeting segment and the target site of the target nucleic acid is 100% over the 14 contiguous 5′-most nucleotides of the target site of the target nucleic acid and as low as 0% or more over the remainder. In such a case, the targeting sequence can be considered to be 14 nucleotides in length. In some cases, the percent complementarity between the targeting sequence of the targeting segment and the target site of the target nucleic acid is 100% over the 17 contiguous 5′-most nucleotides of the target site of the target nucleic acid and as low as 0% or more over the remainder. In such a case, the targeting sequence can be considered to be 17 nucleotides in length. In some cases, the percent complementarity between the targeting sequence of the targeting segment and the target site of the target nucleic acid is 100% over the 18 contiguous 5′-most nucleotides of the target site of the target nucleic acid and as low as 0% or more over the remainder. In such a case, the targeting sequence can be considered to be 18 nucleotides in length.

### Protein-Binding Segment of a Cas9 Guide RNA

[0167] The protein-binding segment of a subject Cas9 guide RNA interacts with a Cas9 protein. The Cas9 guide RNA guides the bound Cas9 protein to a specific nucleotide sequence within target nucleic acid via the above mentioned targeting segment. The protein-binding segment of a Cas9 guide RNA comprises two stretches of nucleotides that are complementary to one another and hybridize to form a double stranded RNA duplex (dsRNA duplex). Thus, the protein-binding segment includes a dsRNA duplex. In some cases, the protein-binding segment also includes stem loop 1 (the “nexus”) of a Cas9 guide RNA. For example, in some cases, the activator of a Cas9 guide RNA (dgRNA or sgRNA) includes (i) a duplex forming segment that contributes to the dsRNA duplex of the protein-binding segment; and (ii) nucleotides 3′ of the duplex forming segment, e.g., that form stem loop 1 (the “nexus”). For example, in some cases, the protein-binding segment includes stem loop 1 (the “nexus”) of a Cas9 guide RNA. In some cases, the protein-binding segment includes 5 or more nucleotides (nt) (e.g., 6 or more, 7 or more, 8 or more, 9 or more, 10 or more, 11 or more, 12 or more, 15 or more, 20 or more, 30 or more, 40 or more, 50 or more, 60 or more, 70 or more, 75 or more, or 80 or more nt) 3′ of the dsRNA duplex (where 3′ is relative to the duplex-forming segment of the activator sequence).

[0168] The dsRNA duplex of the guide RNA (sgRNA or dgRNA) that forms between the activator and targeter is sometimes referred to herein as the “stem loop”. In addition, the activator (activator RNA, tracrRNA) of many naturally existing Cas9 guide RNAs (e.g., S. pygogenes guide RNAs) has 3 stem loops (3 hairpins) that are 3′ of the duplex-forming segment of the activator. The closest stem loop to the duplex-forming segment of the activator (3′ of the duplex forming segment) is called “stem loop 1” (and is also referred to herein as the “nexus”); the next stem loop is called “stem loop 2” (and is also referred to herein as the “hairpin 1”); and the next stem loop is called “stem loop 3” (and is also referred to herein as the “hairpin 2”).

[0169] In some cases, a Cas9 guide RNA (sgRNA or dgRNA) (e.g., a full length Cas9 guide RNA) has stem loops 1, 2, and 3. In some cases, an activator (of a Cas9 guide RNA) has stem loop 1, but does not have stem loop 2 and does not have stem loop 3. In some cases, an activator (of a Cas9 guide RNA) has stem loop 1 and stem loop 2, but does not have stem loop 3. In some cases, an activator (of a Cas9 guide RNA) has stem loops 1, 2, and 3.

[0170] In some cases, the activator (e.g., tracr sequence) of a Cas9 guide RNA (dgRNA or sgRNA) includes (i) a duplex forming segment that contributes to the dsRNA duplex of the protein-binding segment; and (ii) a stretch of nucleotides (e.g., referred to herein as a 3′ tail) 3′ of the duplex forming segment. In some cases, the additional nucleotides 3′ of the duplex forming segment form stem loop 1. In some cases, the activator (e.g., tracr sequence) of a Cas9 guide RNA (dgRNA or sgRNA) includes (i) a duplex forming segment that contributes to the dsRNA duplex of the protein-binding segment; and (ii) 5 or more nucleotides (e.g., 6 or more, 7 or more, 8 or more, 9 or more, 10 or more, 11 or more, 12 or more, 13 or more, 14 or more, 15 or more, 20 or more, 25 or more, 30 or more, 35 or more, 40 or more, 45 or more, 50 or more, 60 or more, 70 or more, or 75 or more nucleotides) 3′ of the duplex forming segment. In some cases, the activator (activator RNA) of a Cas9 guide RNA (dgRNA or sgRNA) includes (i) a duplex forming segment that contributes to the dsRNA duplex of the protein-binding segment; and (ii) 5 or more nucleotides (e.g., 6 or more, 7 or more, 8 or more, 9 or more, 10 or more, 11 or more, 12 or more, 13 or more, 14 or more, 15 or more, 20 or more, 25 or more, 30 or more, 35 or more, 40 or more, 45 or more, 50 or more, 60 or more, 70 or more, or 75 or more nucleotides) 3′ of the duplex forming segment.

[0171] In some cases, the activator (e.g., tracr sequence) of a Cas9 guide RNA (dgRNA or sgRNA) includes (i) a duplex forming segment that contributes to the dsRNA duplex of the protein-binding segment; and (ii) a stretch of nucleotides (e.g., referred to herein as a 3′ tail) 3′ of the duplex forming segment. In some cases, the stretch of nucleotides 3′ of the duplex forming segment has a length in a range of from 5 to 200 nucleotides (nt) (e.g., from 5 to 150 nt, from 5 to 130 nt, from 5 to 120 nt, from 5 to 100 nt, from 5 to 80 nt, from 10 to 200 nt, from 10 to 150 nt, from 10 to 130 nt, from 10 to 120 nt, from 10 to 100 nt, from 10 to 80 nt, from 12 to 200 nt, from 12 to 150 nt, from 12 to 130 nt, from 12 to 120 nt, from 12 to 100 nt, from 12 to 80 nt, from 15 to 200 nt, from 15 to 150 nt, from 15 to 130 nt, from 15 to 120 nt, from 15 to 100 nt, from 15 to 80 nt, from 20 to 200 nt, from 20 to 150 nt, from 20 to 130 nt, from 20 to 120 nt, from 20 to 100 nt, from 20 to 80 nt, from 30 to 200 nt, from 30 to 150 nt, from 30 to 130 nt, from 30 to 120 nt, from 30 to 100 nt, or from 30 to 80 nt). In some cases, the nucleotides of the 3′ tail of an activator RNA are wild type sequences. Although a number of different alternative sequences can be used, an example Cas9 single guide RNA (based on crRNA and tracrRNA from S. pyogenes, where the dsRNA duplex of the protein-binding segment is truncated relative to the dsRNA duplex present in the wild type dual guide RNA) can include the sequence set forth in SEQ ID NO: 958 (This example sequence does not include the guide sequence. The guide sequence, which varies depending on the target, would be 5′ of this example sequence. The activator in this example is 66 nucleotides long).

[0172] Examples of various Cas9 proteins and Cas9 guide RNAs (as well as information regarding requirements related to protospacer adjacent motif (PAM) sequences present in targeted nucleic acids) can be found in the art, for example, see Jinek et al., Science. 2012 Aug. 17; 337(6096):816-21; Chylinski et al., RNA Biol. 2013 May; 10(5):726-37; Ma et al., Biomed Res Int. 2013; 2013:270805; Hou et al., Proc Natl Acad Sci USA. 2013 Sep. 24; 110(39):15644-9; Jinek et al., Elife. 2013; 2:e00471; Pattanayak et al., Nat Biotechnol. 2013 September; 31(9):839-43; Qi et al, Cell. 2013 Feb. 28; 152(5):1173-83; Wang et al., Cell. 2013 May 9; 153(4):910-8; Auer et. al., Genome Res. 2013 Oct. 31; Chen et. al., Nucleic Acids Res. 2013 Nov. 1; 41(20):e19; Cheng et. al., Cell Res. 2013 October; 23(10):1163-71; Cho et. al., Genetics. 2013 November; 195(3):1177-80; DiCarlo et al., Nucleic Acids Res. 2013 April; 41(7):4336-43; Dickinson et. al., Nat Methods. 2013 October; 10(10):1028-34; Ebina et. al., Sci Rep. 2013; 3:2510; Fujii et. al, Nucleic Acids Res. 2013 Nov. 1; 41(20):e187; Hu et. al., Cell Res. 2013 November; 23(11):1322-5; Jiang et. al., Nucleic Acids Res. 2013 Nov. 1; 41(20):e188; Larson et. al., Nat Protoc. 2013 November; 8(11):2180-96; Mali et. at., Nat Methods. 2013 October; 10(10):957-63; Nakayama et. al., Genesis. 2013 December; 51(12):835-43; Ran et. al., Nat Protoc. 2013 November; 8(11):2281-308; Ran et. al., Cell. 2013 Sep. 12; 154(6):1380-9; Upadhyay et. al., G3 (Bethesda). 2013 Dec. 9; 3(12):2233-8; Walsh et. al., Proc Natl Acad Sci USA. 2013 Sep. 24; 110(39):15514-5; Xie et. al., Mol Plant. 2013 Oct. 9; Yang et. al., Cell. 2013 Sep. 12; 154(6):1370-9; Briner et al., Mol Cell. 2014 Oct. 23; 56(2):333-9; and U.S. patents and patent applications: U.S. Pat. Nos. 8,906,616; 8,895,308; 8,889,418; 8,889,356; 8,871,445; 8,865,406; 8,795,965; 8,771,945; 8,697,359; 20140068797; 20140170753; 20140179006; 20140179770; 20140186843; 20140186919; 20140186958; 20140189896; 20140227787; 20140234972; 20140242664; 20140242699; 20140242700; 20140242702; 20140248702; 20140256046; 20140273037; 20140273226; 20140273230; 20140273231; 20140273232; 20140273233; 20140273234; 20140273235; 20140287938; 20140295556; 20140295557; 20140298547; 20140304853; 20140309487; 20140310828; 20140310830; 20140315985; 20140335063; 20140335620; 20140342456; 20140342457; 20140342458; 20140349400; 20140349405; 20140356867; 20140356956; 20140356958; 20140356959; 20140357523; 20140357530; 20140364333; and 20140377868; all of which are hereby incorporated by reference in their entirety.

### Guide RNAs Corresponding to Type V and Type VI CRISPR/Cas Endonucleases (e.g., Cpf1 Guide RNA)

[0173] A guide RNA that binds to a type V or type VI CRISPR/Cas protein (e.g., Cpf1, C2c1, C2c2, C2c3), and targets the complex to a specific location within a target nucleic acid is referred to herein generally as a “type V or type VI CRISPR/Cas guide RNA”. An example of a more specific term is a “Cpf1 guide RNA.”

[0174] A type V or type VI CRISPR/Cas guide RNA (e.g., cpf1 guide RNA) can have a total length of from 30 nucleotides (nt) to 200 nt, e.g., from 30 nt to 180 nt, from 30 nt to 160 nt, from 30 nt to 150 nt, from 30 nt to 125 nt, from 30 nt to 100 nt, from 30 nt to 90 nt, from 30 nt to 80 nt, from 30 nt to 70 nt, from 30 nt to 60 nt, from 30 nt to 50 nt, from 50 nt to 200 nt, from 50 nt to 180 nt, from 50 nt to 160 nt, from 50 nt to 150 nt, from 50 nt to 125 nt, from 50 nt to 100 nt, from 50 nt to 90 nt, from 50 nt to 80 nt, from 50 nt to 70 nt, from 50 nt to 60 nt, from 70 nt to 200 nt, from 70 nt to 180 nt, from 70 nt to 160 nt, from 70 nt to 150 nt, from 70 nt to 125 nt, from 70 nt to 100 nt, from 70 nt to 90 nt, or from 70 nt to 80 nt). In some cases, a type V or type VI CRISPR/Cas guide RNA (e.g., cpf1 guide RNA) has a total length of at least 30 nt (e.g., at least 40 nt, at least 50 nt, at least 60 nt, at least 70 nt, at least 80 nt, at least 90 nt, at least 100 nt, or at least 120 nt,).

[0175] In some cases, a Cpf1 guide RNA has a total length of 35 nt, 36 nt, 37 nt, 38 nt, 39 nt, 40 nt, 41 nt, 42 nt, 43 nt, 44 nt, 45 nt, 46 nt, 47 nt, 48 nt, 49 nt, or 50 nt.

[0176] Like a Cas9 guide RNA, a type V or type VI CRISPR/Cas guide RNA (e.g., cpf1 guide RNA) can include a target nucleic acid-binding segment and a duplex-forming region (e.g., in some cases formed from two duplex-forming segments, i.e., two stretches of nucleotides that hybridize to one another to form a duplex).

[0177] The target nucleic acid-binding segment of a type V or type VI CRISPR/Cas guide RNA (e.g., cpf1 guide RNA) can have a length of from 15 nt to 30 nt, e.g., 15 nt, 16 nt, 17 nt, 18 nt, 19 nt, 20 nt, 21 nt, 22 nt, 23 nt, 24 nt, 25 nt, 26 nt, 27 nt, 28 nt, 29 nt, or 30 nt. In some cases, the target nucleic acid-binding segment has a length of 23 nt. In some cases, the target nucleic acid-binding segment has a length of 24 nt. In some cases, the target nucleic acid-binding segment has a length of 25 nt.

[0178] The guide sequence of a type V or type VI CRISPR/Cas guide RNA (e.g., cpf1 guide RNA) can have a length of from 15 nt to 30 nt (e.g., 15 to 25 nt, 15 to 24 nt, 15 to 23 nt, 15 to 22 nt, 15 to 21 nt, 15 to 20 nt, 15 to 19 nt, 15 to 18 nt, 17 to 30 nt, 17 to 25 nt, 17 to 24 nt, 17 to 23 nt, 17 to 22 nt, 17 to 21 nt, 17 to 20 nt, 17 to 19 nt, 17 to 18 nt, 18 to 30 nt, 18 to 25 nt, 18 to 24 nt, 18 to 23 nt, 18 to 22 nt, 18 to 21 nt, 18 to 20 nt, 18 to 19 nt, 19 to 30 nt, 19 to 25 nt, 19 to 24 nt, 19 to 23 nt, 19 to 22 nt, 19 to 21 nt, 19 to 20 nt, 20 to 30 nt, 20 to 25 nt, 20 to 24 nt, 20 to 23 nt, 20 to 22 nt, 20 to 21 nt, 15 nt, 16 nt, 17 nt, 18 nt, 19 nt, 20 nt, 21 nt, 22 nt, 23 nt, 24 nt, 25 nt, 26 nt, 27 nt, 28 nt, 29 nt, or 30 nt). In some cases, the guide sequence has a length of 17 nt. In some cases, the guide sequence has a length of 18 nt. In some cases, the guide sequence has a length of 19 nt. In some cases, the guide sequence has a length of 20 nt. In some cases, the guide sequence has a length of 21 nt. In some cases, the guide sequence has a length of 22 nt. In some cases, the guide sequence has a length of 23 nt. In some cases, the guide sequence has a length of 24 nt.

[0179] The guide sequence of a type V or type VI CRISPR/Cas guide RNA (e.g., cpf1 guide RNA) can have 100% complementarity with a corresponding length of target nucleic acid sequence. The guide sequence can have less than 100% complementarity with a corresponding length of target nucleic acid sequence. For example, the guide sequence of a type V or type VI CRISPR/Cas guide RNA (e.g., cpf1 guide RNA) can have 1, 2, 3, 4, or 5 nucleotides that are not complementary to the target nucleic acid sequence. For example, in some cases, where a guide sequence has a length of 25 nucleotides, and the target nucleic acid sequence has a length of 25 nucleotides, in some cases, the target nucleic acid-binding segment has 100% complementarity to the target nucleic acid sequence. As another example, in some cases, where a guide sequence has a length of 25 nucleotides, and the target nucleic acid sequence has a length of 25 nucleotides, in some cases, the target nucleic acid-binding segment has 1 non-complementary nucleotide and 24 complementary nucleotides with the target nucleic acid sequence. As another example, in some cases, where a guide sequence has a length of 25 nucleotides, and the target nucleic acid sequence has a length of 25 nucleotides, in some cases, the target nucleic acid-binding segment has 2 non-complementary nucleotides and 23 complementary nucleotides with the target nucleic acid sequence.

[0180] The duplex-forming segment of a type V or type VI CRISPR/Cas guide RNA (e.g., cpf1 guide RNA) (e.g., of a targeter RNA or an activator RNA) can have a length of from 15 nt to 25 nt (e.g., 15 nt, 16 nt, 17 nt, 18 nt, 19 nt, 20 nt, 21 nt, 22 nt, 23 nt, 24 nt, or 25 nt).

[0181] The RNA duplex of a type V or type VI CRISPR/Cas guide RNA (e.g., cpf1 guide RNA) can have a length of from 5 base pairs (bp) to 40 bp (e.g., from 5 to 35 bp, 5 to 30 bp, 5 to 25 bp, 5 to 20 bp, 5 to 15 bp, 5-12 bp, 5-10 bp, 5-8 bp, 6 to 40 bp, 6 to 35 bp, 6 to 30 bp, 6 to 25 bp, 6 to 20 bp, 6 to 15 bp, 6 to 12 bp, 6 to 10 bp, 6 to 8 bp, 7 to 40 bp, 7 to 35 bp, 7 to 30 bp, 7 to 25 bp, 7 to 20 bp, 7 to 15 bp, 7 to 12 bp, 7 to 10 bp, 8 to 40 bp, 8 to 35 bp, 8 to 30 bp, 8 to 25 bp, 8 to 20 bp, 8 to 15 bp, 8 to 12 bp, 8 to 10 bp, 9 to 40 bp, 9 to 35 bp, 9 to 30 bp, 9 to 25 bp, 9 to 20 bp, 9 to 15 bp, 9 to 12 bp, 9 to 10 bp, 10 to 40 bp, 10 to 35 bp, 10 to 30 bp, 10 to 25 bp, 10 to 20 bp, 10 to 15 bp, or 10 to 12 bp).

[0182] As an example, a duplex-forming segment of a Cpf1 guide RNA can comprise a nucleotide sequence selected from (5′ to 3′): AAUUUCUACUGUUGUAGAU (SEQ ID NO: 1093), AAUUUCUGCUGUUGCAGAU (SEQ ID NO: 1094), AAUUUCCACUGUUGUGGAU (SEQ ID NO: 1095), AAUUCCUACUGUUGUAGGU (SEQ ID NO: 1096), AAUUUCUACUAUUGUAGAU (SEQ ID NO: 1097), AAUUUCUACUGCUGUAGAU (SEQ ID NO: 1098), AAUUUCUACUUUGUAGAU (SEQ ID NO: 1099), and AAUUUCUACUUGUAGAU (SEQ ID NO: 1100). The guide sequence can then follow (5′ to 3′) the duplex forming segment.

[0183] A non-limiting example of an activator RNA (e.g. tracrRNA) of a C2c1 guide RNA (dual guide or single guide) is an RNA that includes the nucleotide sequence GAAUUUUUCAACGGGUGUGCCAAUGGCCACUUUCCAGGUGGCAAAGCCCGUUGA GCUUCUCAAAAAG (SEQ ID NO: 1101). In some cases, a C2c1 guide RNA (dual guide or single guide) is an RNA that includes the nucleotide sequence In some cases, a C2c1 guide RNA (dual guide or single guide) is an RNA that includes the nucleotide sequence GUCUAGAGGACAGAAUUUUUCAACGGGUGUGCCAAUGGCCACUUUCCAGGUGGC AAAGCCCGUUGAGCUUCUCAAAAAG (SEQ ID NO: 1102). In some cases, a C2c1 guide RNA (dual guide or single guide) is an RNA that includes the nucleotide sequence UCUAGAGGACAGAAUUUUUCAACGGGUGUGCCAAUGGCCACUUUCCAGGUGGCA AAGCCCGUUGAGCUUCUCAAAAAG (SEQ ID NO: 1103). A non-limiting example of an activator RNA (e.g. tracrRNA) of a C2c1 guide RNA (dual guide or single guide) is an RNA that includes the nucleotide sequence ACUUUCCAGGCAAAGCCCGUUGAGCUUCUCAAAAAG (SEQ ID NO: 1104). In some cases, a duplex forming segment of a C2c1 guide RNA (dual guide or single guide) of an activator RNA (e.g. tracrRNA) includes the nucleotide sequence AGCUUCUCA (SEQ ID NO: 1105) or the nucleotide sequence GCUUCUCA (SEQ ID NO: 1106) (the duplex forming segment from a naturally existing tracrRNA.

[0184] A non-limiting example of a targeter RNA (e.g. crRNA) of a C2c1 guide RNA (dual guide or single guide) is an RNA with the nucleotide sequence CUGAGAAGUGGCACNNNNNNNNNNNNNNNNNNNN (SEQ ID NO: 1107), where the Ns represent the guide sequence, which will vary depending on the target sequence, and although 20 Ns are depicted a range of different lengths are acceptable. In some cases, a duplex forming segment of a C2c1 guide RNA (dual guide or single guide) of a targeter RNA (e.g. crRNA) includes the nucleotide sequence CUGAGAAGUGGCAC (SEQ ID NO: 1108) or includes the nucleotide sequence CUGAGAAGU (SEQ ID NO: 1109) or includes the nucleotide sequence UGAGAAGUGGCAC (SEQ ID NO: 1110) or includes the nucleotide sequence UGAGAAGU (SEQ ID NO: 1111).

[0185] Examples and guidance related to type V or type VI CRISPR/Cas endonucleases and guide RNAs (as well as information regarding requirements related to protospacer adjacent motif (PAM) sequences present in targeted nucleic acids) can be found in the art, for example, see Zetsche et al, Cell. 2015 Oct. 22; 163(3):759-71; Makarova et al, Nat Rev Microbiol. 2015 November; 13(11):722-36; and Shmakov et al., Mol Cell. 2015 Nov. 5; 60(3):385-97.

### Target Genomic DNA

[0186] A target nucleic acid (e.g., target genomic DNA) is located within a zygote.

[0187] A target genomic DNA can be any genomic DNA in which the sequence is to be modified, e.g., by substitution and/or insertion and/or deletion of one or more nucleotides present in the target genomic DNA.

[0188] Target genes (target genomic DNA) include those genes involved in various diseases or conditions. In some cases, the target genomic DNA is mutated, such that it encodes a non-functional polypeptide, or such that a polypeptide encoded by the target genomic DNA is not synthesized in any detectable amount, or such that a polypeptide encoded by the target genomic DNA is synthesized in a lower than normal amount, such that an individual having the mutation has a disease. Such diseases include, but are not limited to, achondroplasia, achromatopsia, acid maltase deficiency, adenosine deaminase deficiency, adrenoleukodystrophy, aicardi syndrome, alpha-1 antitrypsin deficiency, alpha-thalassemia, androgen insensitivity syndrome, apert syndrome, arrhythmogenic right ventricular, dysplasia, ataxia telangictasia, barth syndrome, beta-thalassemia, blue rubber bleb nevus syndrome, canavan disease, chronic granulomatous diseases (CGD), cri du chat syndrome, Crigler-Najjer Syndrome, cystic fibrosis, dercum's disease, ectodermal dysplasia, fanconi anemia, fibrodysplasia ossificans progressive, fragile X syndrome, galactosemis, Gaucher's disease, generalized gangliosidoses (e.g., GM1), Glycogen Storage Disease Type IV, hemochromatosis, the hemoglobin C mutation in the 6th codon of beta-globin (HbC), hemophilia, Huntington's disease, Hurler Syndrome, hypophosphatasia, Klinefelter syndrome, Krabbes Disease, Langer-Giedion Syndrome, leukocyte adhesion deficiency (LAD, OMIM No. 116920), leukodystrophy, long QT syndrome, Marfan syndrome, Moebius syndrome, mucopolysaccharidosis (MPS), nail patella syndrome, nephrogenic diabetes insipdius, neurofibromatosis, Neimann-Pick disease, osteogenesis imperfecta, porphyria, Prader-Willi syndrome, progeria, Proteus syndrome, retinoblastoma, Rett syndrome, Rubinstein-Taybi syndrome, Sanfilippo syndrome, severe combined immunodeficiency (SCID), Shwachman syndrome, sickle cell disease (sickle cell anemia), Smith-Magenis syndrome, Stickler syndrome, Tay-Sachs disease, Thrombocytopenia Absent Radius (TAR) syndrome, Treacher Collins syndrome, trisomy, tuberous sclerosis, Turner's syndrome, urea cycle disorder, von Hippel-Landau disease, Waardenburg syndrome, Williams syndrome, Wilson's disease, Wiskott-Aldrich syndrome, and X-linked lymphoproliferative syndrome. Other such diseases include, e.g., acquired immunodeficiencies, lysosomal storage diseases (e.g., Gaucher's disease, GM1, Fabry disease and Tay-Sachs disease), mucopolysaccahidosis (e.g. Hunter's disease, Hurler's disease), hemoglobinopathies (e.g., sickle cell diseases, HbC, α-thalassemia, β-thalassemia) and hemophilias.

[0189] For example, in some cases, the target genomic DNA comprises a mutation that gives rise to a trinucleotide repeat disease. Exemplary trinucleotide repeat diseases and target genes involved in trinucleotide repeat diseases Trinucleotide Repeat Diseases Gene DRPLA (Dentatorubropallidoluysian atrophy) ATN1 or DRPLA HD (Huntington's disease) HTT (Huntingtin) SBMA (Spinobulbar muscular atrophy or Androgen receptor on the Kennedy disease) X chromosome. SCA1 (Spinocerebellar ataxia Type 1) ATXN1 SCA2 (Spinocerebellar ataxia Type 2) ATXN2 SCA3 (Spinocerebellar ataxia Type 3 or ATXN3 Machado-Joseph disease) SCA6 (Spinocerebellar ataxia Type 6) CACNA1A SCA7 (Spinocerebellar ataxia Type 7) ATXN7 SCA17 (Spinocerebellar ataxia Type 17) TBP FRAXA (Fragile X syndrome) FMR1, on the X-chromosome FXTAS (Fragile X-associated tremor/FMR1, on the X-ataxia syndrome) chromosome FRAXE (Fragile XE mental retardation) AFF2 or FMR2, on the X-chromosome FRDA (Friedreich's ataxia) FXN or X25, (frataxin-reduced expression) DM (Myotonic dystrophy) DMPK SCA8 (Spinocerebellar ataxia Type 8) OSCA or SCA8 SCA12 (Spinocerebellar ataxia Type 12) PPP2R2B or SCA12.

[0190] For example, in some cases, a suitable target genomic DNA is a β-globin gene, e.g., a β-globin gene with a sickle cell mutation. As another example, a suitable target genomic DNA is a Huntington's locus, e.g., an HIT gene, where the HTT gene comprises a mutation (e.g., a CAG repeat expansion comprising more than 35 CAG repeats) that gives rise to Huntington's Disease. As another example, a suitable target genomic DNA is an adenosine deaminase gene that comprises a mutation that gives rise to severe combined immunodeficiency. As another example, a suitable target genomic DNA is a BCL11A gene comprising a mutation associated with control of the gamma-globin genes.

### Donor Polynucleotide

[0191] In some cases, a genome targeting composition comprises a donor template nucleic acid (“donor polynucleotide”). In some cases, a method of the present disclosure comprises contacting the target DNA with a donor polynucleotide, wherein the donor polynucleotide, a portion of the donor polynucleotide, a copy of the donor polynucleotide, or a portion of a copy of the donor polynucleotide integrates into the target DNA (e.g., via homology-directed repair). In some cases, the method does not comprise contacting the cell with a donor polynucleotide (e.g., resulting in non-homologous end-joining). A donor poly nucleotide can be introduced into a target cell using any convenient technique for introducing nucleic acids into cells.

[0192] When it is desirable to insert a polynucleotide sequence into a target DNA sequence, a polynucleotide comprising a donor sequence to be inserted is provided to the cell (e.g., the target DNA is contacted with a donor polynucleotide in addition to a genome targeting composition (e.g., a genome editing endonuclease; or a genome-editing endonuclease and a guide RNA). By a “donor sequence” or “donor polynucleotide” it is meant a nucleic acid sequence to be inserted at the cleavage site induced by a genome-editing endonuclease. A suitable donor polynucleotide can be single stranded or double stranded. For example, in some cases, a donor polynucleotide is single stranded (e.g., in some cases can be referred to as an oligonucleotide), and in some cases a donor polynucleotide is double stranded (e.g., in some cases can be include two separate oligonucleotides that are hybridized). The donor polynucleotide will contain sufficient homology to a genomic sequence at the cleavage site, e.g. 70%, 80%, 85%, 90%, 95%, or 100% homology with the nucleotide sequences flanking the cleavage site, e.g. within 100 bases or less (e.g., 50 bases or less of the cleavage site, e.g. within 30 bases, within 15 bases, within 10 bases, within 5 bases, or immediately flanking the cleavage site), to support homology-directed repair between it and the genomic sequence to which it bears homology. Approximately 25 nucleotides (nt) or more (e.g., 30 nt or more, 40 nt or more, 50 nt or more, 60 nt or more, 70 nt or more, 80 nt or more, 90 nt or more, 100 nt or more, 150 nt or more, 200 nt or more, etc.) of sequence homology between a donor and a genomic sequence (or any integral value between 10 and 200 nucleotides, or more) can support homology-directed repair. For example, in some cases, the 5′ and/or the 3′ flanking homology arm (e.g., in some cases both of the flanking homology arms) of a donor polynucleotide can be 30 nucleotides (nt) or more in length (e.g., 40 nt or more, 50 nt or more, 60 nt or more, 70 nt or more, 80 nt or more, 90 nt or more, 100 nt or more, etc.). For example, in some cases, the 5′ and/or the 3′ flanking homology arm (e.g., in some cases both of the flanking homology arms) of a donor polynucleotide can have a length in a range of from 30 nt to 500 nt (e.g., 30 nt to 400 nt, 30 nt to 350 nt, 30 nt to 300 nt, 30 nt to 250 nt, 30 nt to 200 nt, 30 nt to 150 nt, 30 nt to 100 nt, 30 nt to 90 nt, 30 nt to 80 nt, 50 nt to 400 nt, 50 nt to 350 nt, 50 nt to 300 nt, 50 nt to 250 nt, 50 nt to 200 nt, 50 nt to 150 nt, 50 nt to 100 nt, 50 nt to 90 nt, 50 nt to 80 nt, 60 nt to 400 nt, 60 nt to 350 nt, 60 nt to 300 nt, 60 nt to 250 nt, 60 nt to 200 nt, 60 nt to 150 nt, 60 nt to 100 nt, 60 nt to 90 nt, 60 nt to 80 nt).

[0193] Donor sequences can be of any length, e.g. 10 nucleotides or more, 50 nucleotides or more, 100 nucleotides or more, 250 nucleotides or more, 500 nucleotides or more, 1000 nucleotides or more, 5000 nucleotides or more, etc.

[0194] The donor sequence is typically not identical to the genomic sequence that it replaces. Rather, the donor sequence may contain at least one or more single base changes, insertions, deletions, inversions or rearrangements with respect to the genomic sequence, so long as sufficient homology is present to support homology-directed repair. In some embodiments, the donor sequence comprises a non-homologous sequence flanked by two regions of homology, such that homology-directed repair between the target DNA region and the two flanking sequences results in insertion of the non-homologous sequence at the target region. Donor sequences may also comprise a vector backbone containing sequences that are not homologous to the DNA region of interest and that are not intended for insertion into the DNA region of interest. Generally, the homologous region(s) of a donor sequence will have at least 50% sequence identity to a genomic sequence with which recombination is desired. In certain embodiments, 60%, 70%, 80%, 90%, 95%, 98%, 99%, or 99.9% sequence identity is present. Any value between 1% and 100% sequence identity can be present, depending upon the length of the donor polynucleotide.”

[0195] In some cases, a donor polynucleotide is delivered to the zygote (introduced into a zygote) as part of recombinant viral vector (e.g., an adeno-associated virus (AAV) vector; a lentiviral vector; etc.). For example a recombinant viral DNA vector can include a donor polynucleotide sequence (donor sequence) (e.g., a recombinant viral DNA vector can include a DNA molecule that includes a donor polynucleotide sequence). In some cases, a donor polynucleotide is introduced into a zygote as a recombinant viral DNA vector (e.g., the donor polynucleotide sequence is present as part of the viral DNA) and the genome-editing endonuclease (e.g., Cas9 protein; etc.) and, where applicable, a guide RNA are delivered by a different route. For example, in some cases, a donor polynucleotide is introduced into a zygote as a recombinant virus vector (e.g., the donor polynucleotide sequence is present as part of the recombinant viral vector and a Cas9 protein and Cas9 guide RNA are delivered as part of a separate expression vector. In some cases, a donor polynucleotide is introduced into a zygote as a recombinant viral vector; (e.g., the donor polynucleotide sequence is present as part of the recombinant viral vector) and a Cas9 protein and Cas9 guide RNA are delivered as part of a ribonucleoprotein complex (RNP). In some cases: (i) a donor polynucleotide is introduced into a zygote as a recombinant viral vector (e.g., the donor polynucleotide sequence is present as part of the recombinant viral vector), (ii) a Cas9 guide RNA is delivered as either an RNA or DNA encoding the RNA, and (iii) a Cas9 protein is delivered as a protein or as a nucleic acid encoding the protein (e.g., RNA or DNA).

[0196] In some cases, a recombinant viral vector (e.g., a recombinant AAV vector, a recombinant lentiviral vector, a recombinant retroviral vector; etc.) comprising a donor polynucleotide is introduced into a zygote before a Cas9-guide RNA RNP is introduced into the cell. For example, in some cases, a recombinant viral vector comprising a donor polynucleotide is introduced into a zygote from 2 hours to 72 hours (e.g., from 2 hours to 4 hours, from 4 hours to 8 hours, from 8 hours to 12 hours, from 12 hours to 24 hours, from 24 hours to 48 hours, or from 48 hours to 72 hours) before the Cas9-guide RNA RNP is introduced into the zygote.

Introducing a Genome-Modifying Composition into a Zygote

[0197] A genome-modifying composition can be introduced into a zygote by electroporation. An electroporation mixture, comprising: a) a genome-modifying composition; and b) one zygote or a plurality of zygotes. Suitable genome-modifying compositions are described above. A genome-modifying composition can comprise an RNP comprising: i) an RNA-guided endonuclease (e.g., a CRISPR/Cas polypeptide); and ii) one or more guide RNAs. A genome-modifying composition can comprise an RNP comprising: i) an RNA-guided endonuclease (e.g., a CRISPR/Cas polypeptide); ii) one or more guide RNAs; and iii) a donor template DNA. A genome-modifying composition can comprise: a) an RNP comprising: i) an RNA-guided endonuclease (e.g., a CRISPR/Cas polypeptide); and ii) one or more guide RNAs; and b) a donor template DNA.

[0198] A method of the present disclosure involves electroporating a ribonucleoprotein (RNP) complex into a zygote. In some cases, a method of the present disclosure comprises: a) combining, in an electroporation container (e.g., an electroporation cuvette) a zygote or a plurality of zygotes (e.g., from 1 zygote to 150 zygotes; e.g., from 1 zygote to 5 zygotes, from 10 zygotes to 15 zygotes, from 15 zygotes to 20 zygotes, from 20 zygotes to 25 zygotes, from 25 zygotes to 30 zygotes, from 30 zygotes to 35 zygotes, from 35 zygotes to 40 zygotes, from 40 zygotes to 45 zygotes, from 45 zygotes to 50 zygotes, from 50 zygotes to 75 zygotes, from 75 zygotes to 100 zygotes, from 100 zygotes to 120 zygotes, from 120 zygotes to 140 zygotes, or from 140 zygotes to 150 zygotes) in a suitable liquid medium with an equal volume of a genome targeting composition, forming a zygote/genome targeting composition; and b) electroporating the zygote/genome targeting composition with 2 pulses at 30 V, where each pulse is a 3-millisecond (msec) pulse, with a 1 msec interval between the 2 pulses. In some cases, at least 50%, at least 60%, at least 70%, at least 80%, at least 85%, at least 90%, at least 95%, or at least 98%, of the zygotes are viable after electroporation. In some cases, from 50% to 95% of the zygotes are viable after electroporation. In some cases, from 60% to 95% of the zygotes are viable after electroporation. In some cases, from 70% to 95% of the zygotes are viable after electroporation. In some cases, from 80% to 95% of the zygotes are viable after electroporation. In some cases, 100% of the zygotes are viable after electroporation. In some cases, the genomic modification occurs via HDR or NHEJ. In some cases, the genomic modification occurs via HDR, and wherein the efficiency of HDR is at least 50%, at least 60%, at least 70%, at least 80%, at least 90%, or 100%. In some cases, the genomic modification occurs via NHEJ, and wherein the efficiency of NHEJ is at least 50%, at least 60%, at least 70%, at least 80%, at least 90%, or 100%.

[0199] A method of the present disclosure involves electroporating a ribonucleoprotein (RNP) complex into a zygote. In some cases, a method of the present disclosure comprises: a) combining, in an electroporation container (e.g., an electroporation cuvette) a zygote or a plurality of zygotes (e.g., from 1 zygote to 150 zygotes; e.g., from 1 zygote to 5 zygotes, from 10 zygotes to 15 zygotes, from 15 zygotes to 20 zygotes, from 20 zygotes to 25 zygotes, from 25 zygotes to 30 zygotes, from 30 zygotes to 35 zygotes, from 35 zygotes to 40 zygotes, from 40 zygotes to 45 zygotes, from 45 zygotes to 50 zygotes, from 50 zygotes to 75 zygotes, from 75 zygotes to 100 zygotes, from 100 zygotes to 120 zygotes, from 120 zygotes to 140 zygotes, or from 140 zygotes to 150 zygotes) in a suitable liquid medium with an equal volume of a genome targeting composition, forming a zygote/genome targeting composition; and b) electroporating the zygote/genome targeting composition with 6 pulses at 30 V per pulse, where each pulse is a 3-millisecond (msec) pulse, with a 1 msec interval between consecutive pulses. In some cases, at least 50%, at least 60%, at least 70%, at least 80%, at least 85%, at least 90%, at least 95%, or at least 98%, of the zygotes are viable after electroporation. In some cases, from 50% to 95% of the zygotes are viable after electroporation. In some cases, from 60% to 95% of the zygotes are viable after electroporation. In some cases, from 70% to 95% of the zygotes are viable after electroporation. In some cases, from 80% to 95% of the zygotes are viable after electroporation. In some cases, 100% of the zygotes are viable after electroporation. In some cases, the genomic modification occurs via HDR or NHEJ. In some cases, the genomic modification occurs via HDR, and wherein the efficiency of HDR is at least 50%, at least 60%, at least 70%, at least 80%, at least 90%, or 100%. In some cases, the genomic modification occurs via NHEJ, and wherein the efficiency of NHEJ is at least 50%, at least 60%, at least 70%, at least 80%, at least 90%, or 100%.

[0200] A method of the present disclosure involves electroporating a ribonucleoprotein (RNP) complex into a zygote. In some cases, a method of the present disclosure comprises: a) combining, in an electroporation container (e.g., an electroporation cuvette) a zygote or a plurality of zygotes (e.g., from 1 zygote to 150 zygotes; e.g., from 1 zygote to 5 zygotes, from 10 zygotes to 15 zygotes, from 15 zygotes to 20 zygotes, from 20 zygotes to 25 zygotes, from 25 zygotes to 30 zygotes, from 30 zygotes to 35 zygotes, from 35 zygotes to 40 zygotes, from 40 zygotes to 45 zygotes, from 45 zygotes to 50 zygotes, from 50 zygotes to 75 zygotes, from 75 zygotes to 100 zygotes, from 100 zygotes to 120 zygotes, from 120 zygotes to 140 zygotes, or from 140 zygotes to 150 zygotes) in a suitable liquid medium with an equal volume of a genome targeting composition, forming a zygote/genome targeting composition; and b) electroporating the zygote/genome targeting composition with a single pulse at 30 V, where the single pulse is a 3-millisecond (msec) pulse. In some cases, the RNP is present in the electroporation composition at a concentration of from 5 μM to 16 μM. In some cases, the RNP is present in the electroporation composition at a concentration of 8 μM. In some cases, at least 50%, at least 60%, at least 70%, at least 80%, at least 85%, at least 90%, at least 95%, or at least 98%, of the zygotes are viable after electroporation with the RNP. In some cases, from 50% to 95% of the zygotes are viable after electroporation with the RNP. In some cases, from 60% to 95% of the zygotes are viable after electroporation with the RNP. In some cases, from 70% to 95% of the zygotes are viable after electroporation with the RNP. In some cases, from 80% to 95% of the zygotes are viable after electroporation with the RNP. In some cases, 100% of the zygotes are viable after electroporation with the RNP. In some cases, the genomic modification occurs via homology-directed repair (HDR) or non-homologous end joining (NHEJ). In some cases, the genomic modification occurs via HDR, and wherein the efficiency of HDR is at least 50%, at least 60%, at least 70%, at least 80%, at least 90%, or 100%. In some cases, the genomic modification occurs via NHEJ, and wherein the efficiency of NHEJ is at least 50%, at least 60%, at least 70%, at least 80%, at least 90%, or 100%.

[0201] In some cases, the RNP complex comprises an RNA and a DNA-binding polypeptide, where the RNA and the DNA-binding polypeptide are present in a ratio of from 0.5:1 to 1:1, from 1:1 to 1:1.5, or from 1:1.5 to 1:2 RNA:DNA-binding polypeptide. In some cases, the RNP complex is present in the electroporation mixture at a concentration of from 5 μM to 15 μM, e.g., from 5 μM to 10 μM, or from 10 μM to 15 μM. In some cases, the RNP complex is present in the electroporation mixture at a concentration of 8 μM. In some cases, the electroporation mixture includes a donor DNA template. The donor DNA template can be part of the RNP, or can be separate from the RNP.

### EXAMPLES

[0202] The following examples are put forth so as to provide those of ordinary skill in the art with a complete disclosure and description of how to make and use the present invention, and are not intended to limit the scope of what the inventors regard as their invention nor are they intended to represent that the experiments below are all or the only experiments performed. Efforts have been made to ensure accuracy with respect to numbers used (e.g. amounts, temperature, etc.) but some experimental errors and deviations should be accounted for. Unless indicated otherwise, parts are parts by weight, molecular weight is weight average molecular weight, temperature is in degrees Celsius, and pressure is at or near atmospheric. Standard abbreviations may be used, e.g., bp, base pair(s); kb, kilobase(s); pl, picoliter(s); s or sec, second(s); min, minute(s); h or hr, hour(s); aa, amino acid(s); kb, kilobase(s); bp, base pair(s); nt, nucleotide(s); i.m., intramuscular(ly); i.p., intraperitoneal(ly); s.c., subcutaneous(ly); and the like.

### Example 1: Genome Editing in Zygotes Via NHEJ or HDR

[0203] A method to directly deliver Cas9:sgRNA ribonucleoproteins (RNPs) into mouse zygotes by electroporation, using standard commercially available equipment and reagents common to most biological labs, is described. This method is called CRISPR RNP electroporation of zygotes (CRISPR-EZ). The use of CRISPR-EZ leads to genome editing in zygotes and generates animals with homogeneous genetic modifications.

[0204] Using a sgRNA targeting tyrosinase (tyr), a key enzyme for pigment synthesis, live animals were generated with 100% editing efficiency (NHEJ or HDR), of which 88% exhibiting bi-allelic editing and 42% harboring a HDR-mediated modification. CRISPR-EZ edited embryos exhibited a significant increase in survival; and edited animals were viable and germline competent. This CRISPR-EZ technology has been employed for genome editing on multiple genes, and high efficiency editing was consistently obtained in generating a variety of desired genomic modifications, including indel mutations, precise deletion and small precise insertions. Taken together, CRISPR-EZ is a simple, economic, high-throughput, and highly efficient technique for genome editing in vivo, which has a great potential to replace the traditional microinjection-dependent technique in a variety of mammalian species.

### Materials and Methods

[0205] Designing Single Guide RNA (sgRNA)

[0206] Using one of many online resources (e.g., http:(double forward slash)crispr(dot)dfci(dot)harvard(dot)edu/SSC/), input target DNA sequence. The precise choice of sgRNA(s) largely depends on the needs of the researcher. Inserts, deletions and Knock-Ins all have different criteria for selection of sgRNA. Choose three or four sgRNAs with reasonably high scores (e.g., 0.80 or higher).

In Vitro T7 Transcription of sgRNA

[0207] For each sgRNA, a synthetically assembled oligonucleotide (Integrated DNA technologies, San Diego, Calif.) DNA Template is generated by overlapping polymerase chain reaction (PCR) that includes a T7 Promoter followed by the 20 nt target sequence obtained from previous section, and concluded with 15 nt that hybridize to an optimized sgRNA scaffold.

[0208] Briefly, for each sgRNA template, the 50 μL PCR reaction included 0.02 M uniquely designed oligonucleotide (5′-GGA TCC TAA TAC GAC TCA CTA TAG—guide-sequence—GTT TTA GAG CTA GAA), while the remaining reagents are common to all template synthesis reactions; 0.02 μM T7RevLong (5′AAA AAA GCA CCG ACT CGG TGC CAC TTT TTC AAG TTG ATA ACG GAC TAG CCT TAT TTT AAC TTG CTA TTT CTA GCT CTA AAA C) (SEQ ID NO:1143), 1 μM T7FwdAmp (5′-GGA TCC TAA TAC GAC TCA CTA TAG) (SEQ ID NO:1144). 1 μM T7RevAmp (5′-AAA AAA GCA CCG ACT CGG) (SEQ ID NO: 1145), 10 mM dNTPs and Phusion Polymerase (NEB m0530, Ipswich, Mass.) according to manufacturer's protocol. The thermocycler setting consisted of 30 cycles of 95° C. for 10 s, 57° C. for 10 s and 72° C. for 10 s. Following the PCR reaction, the product may be frozen at −20° C. or used immediately. The sequences for all of the sgRNAs used in this project were: sgTyr (5′ GGG TGG ATG ACC GTG AGT CC) (SEQ ID NO:1146), sgCdh1 (5′TAT GAC TGG AGT CCC GGG CG) (SEQ ID NO:1147), sgCdk8 (5′AGA CAG AAA CAC CTT CAG AA) (SEQ ID NO:1148), sgKif11 (5′CGT GGA ATT ATA CCA GCC AG) (SEQ ID NO:1149), Mecp2 R1 (5′AGG AGT GAG GTC TAG TAC TT) (SEQ ID NO:1150), Mecp2 L2 (5′ CCC AAG GAT ACA GTA TCC TA) (SEQ ID NO:1151).

[0209] The 20 uL In Vitro Transcription (IVT) reaction consists of 25 ng/μL of PCR amplified DNA template, 10 mM nucleotide triphosphates (NTPs) and T7 RNA Polymerase enzyme and reaction buffer (NEB E2040S) as per manufacturer's protocol. The reaction is mixed by gentle pipetting and placed in a thermocycler set to 37° C. for more than 18 hrs. At the end of the incubation period, 1 μL of RNAse-Free DNASE (NEB M0303S) is added and further incubated at room temperature (RT=22-25° C.).

[0210] To purify the IVT reaction, the total volume is brought to 150 uL with 100% Ethanol. To this, 100 μL of 5× AmpureXL (Beckman Coulter A63880, or equivalent reagent, such as MagNa beads as described in Rohland 2012) for solid-phase reversible immobilization (SPRI) for RNA cleanup. The reaction is mixed by pipetting ten times and left to incubate at room temperature (RT) for five minutes. Reactions are placed on a magnetic stand (Invitrogen 12321D) for 5 minutes, until pellet is formed. Supernatant is carefully discarded, so as to not disturb newly formed pellet. To wash the pellet, 80% Ethanol is pipetted gently over the pellet and allowed to sit for 2 minutes. This was then repeated for a total of two wash steps. The supernatant is again carefully discarded and the pellet is allowed to air dry for ten minutes. To elute the RNA, the reaction is removed from the magnetic stand and pellet is pipetted with 20 μL of RNASE-Free H₂O (AMBION AM9937) and allowed to incubate at RT for two minutes. The reaction was then placed back onto the stand for an additional five minutes at which point the supernatant is carefully transferred to a RNASE-Free tube (VWR 211-0319) for storage in −80° C.

### Intraperitoneal Injection of Superovulation Hormones

[0211] Female Mice (C57BL/6J JAX 000664), aged 3-5 weeks, are collected. Superovulation of the female mice is initiated via intraperitoneal injection (IP) of approximately 5 IU (international Units) of Pregnant Mare Serum Gonadotropin (PMSG) (Calbiochem, Millipore: Cat#367222), followed by injection of Human Chorion Gonadotropin (HCG) (Calbiochem (Millipore: Cat#230734) administered 46-48 hrs after PMSG. Lyophilized (1 mg=1000 IU) PMSG stock is reconstituted in 20 mL of bacteriostatic sterile saline (CATALOG), and Lyophilized (1 mg=3000 IU) HCG stock is reconstituted in 60 mL of bacteriostatic sterile saline to obtain the working stock concentrations of 50 IU/mL. Both hormone stocks are maintained in aliquots of 600 μL at −80° C. until the time of injection, at which time the aliquot is thawed to room temperature immediately prior to the IP injection. For IP injections, 100 μL of PMSG (and then HCG) stock solution is administered, typically between 1-2 pm on Day 1, which introduces 5 IU of PMSG into the female mouse. Immediately after HCG injection, females are housed 1:1 with 3-8 month old males of proven fertility.

### Embryo Harvest

[0212] The morning after HcG IP injection, females are checked for the presence of a copulation plug. The plugged mice are sacrificed by asphyxiation (CO₂) followed by cervical dislocation. Pronucleus stage embryos of approximately 0.5 days post coitum (0.5 dpc) are collected by surgically opening abdominal cavity, isolating and removing both oviduct structures into 60×15 mm culture plates (CellStar Greiner Bio-One 628160) containing 50 μL droplets of M2+BSA (Millipore MR-015-D supplemented with BSA at 4 mg/mL Sigma 4919, followed by filtration to sterilize with MillexHV SLHV033RB). While viewing through a Stereomicroscope, (Nikon SMZ-U or equivalent), the ampulla of each oviduct is nicked, releasing a mixture of approximately 20 fertilized embryos and unfertilized oocytes surrounded in a cumulus cell network into M2+BSA collection media. All cumulus oocyte complexes are transferred in 50 μL of M2+BSA to a 200 μL droplet of Hyaluronidase/M2 (Millipore MR-051-F) to dissociate cumulus cells from zygotes with an exposure time of approximately 1 minute. All embryos from this point on are manipulated by mouth-pipetting with the use of a 15-inch aspirator tube (Sigma A5177), and a hand-made glass needle fashioned by glass pulling of capillary tubes (Sigma P0674) over an open flame. Embryos are passed through five washes of M2+BSA to remove cumulus cells. With as little additional volume as is reasonable, embryos are transferred to a 200 μL droplet of Acid Tyrode's Solution (Sigma T1788). As batch to batch variation of Acid Tyrode's solution exists, the exact timing of exposure must be ascertained empirically. This is done by exposure and viewing of about 10 embryos under the stereomicroscope. Embryos were exposed until approximately 15-20% of the Zona Pellucida has been digested, which typically occurs between 30-60 seconds. This thinning of the Zona serves to facilitate transfer of protein and nucleic acids into the embryo. Caution must be used so as to not over treat the embryo, as Acid's Tyrode's exposure can lead to a loss of viability. Following treatment, embryos are transferred to an additional M2+BSA wash droplet and then immediately transferred to a second droplet so as to drastically minimize the embryos exposure to fully concentrated Acid Tyrode's solution. This is followed by two additional M2+BSA washes. Embryos are temporarily stored in a water jacketed, 5% CO₂ incubator at 37° C. and 95% humidity, until time of electroporation.

Electroporation of RNP Complex into Embryos

[0213] Per electroporation condition, 30 embryos are passed through 10 μL of pre-warmed Opti-MEM Reduced Serum Media (Thermo Fisher Scientific 31985062) a total of three times to dilute M2+BSA volume. In 10 μL of Opti-MEM, all 30 embryos are transferred to 10 uL of Cas9 RiboNucleoProtein (RNP) Mixture. The RNP mixture consisted of 40 μM stock solution of Cas9 Protein in a 1:1.2 molar ratio with sgRNA in 20 mM HEPES PH7.5 (SIGMA h3375), 150 mM KCL (SIGMA p9333), 1 mM MgCl₂ (SIGMA m8266), 10% glycerol (FISHER BP229) and 1 mM TCEP (tris(2-carboxyethyl)phosphine SIGMA c4706) a reducing agent. When required, 200 pmol of HDR template is included. Donor HDR oligos used were: Tyr ssDNA donor v1 5′ GTG CAC CAT CTG GAC CTC AGT TCC CCT TCA AAG GGG TGG ATG ACC GTG AAT TCC TGG CCC TCT GTG TTT TAT AAT AGG ACC TGC CAG TGC TC (SEQ ID NO:1152); Mecp2-L2-loxP 5′CCA GCA ACC TAA AGC TGT TAA GAA ATC TTT GGG CCC CAG CTT GAC CCA AGG ATA CAG TAT GCT AGC ATA ACT TCG TAT AAT GTA TGC TAT ACG AAG TTA TCC TAG GGA AGT TAC CAA AAT CAG AGA TAG TAT GCA GCA GCC AGG GGT CTC ATG TGT GGC A (SEQ ID NO:1153). Mecp2-R1-loxP 5′CCA CTC CTC TGT ACT CCC TGG CTT TTC CAC AAT CCT TAA ACT GAA GGA GTG AGG TCT AGT ATA ACT TCG TAT AGC ATA CAT TAT ACG AAG TTA TGA ATT CAC TTG GGG GTC ATT GGG CTA GAC TGA ATA TCT TTG GTT GGT ACC CAG ACC TAA TCC ACC A (SEQ ID NO: 1154). The RNP Mixture is prepared by incubating at 37° C. for 10 min immediately prior to combining with Embryo/Opti-MEM sample. Entire 20 μL mixture is pipetted into a 1 mm Electroporation cuvette (BIORAD 1652089) and loaded into electroporator (BIORAD Gene Pulser Xcell). Electrical pulse is delivered to the reaction mixture through the square wave delivery protocol. The conditions of the pulse delivery is two pulses at 30V at a pulse length of 3 msec with an interval of 1 msec. Immediately following electroporation, embryos are recovered from the cuvette by flushing with 100 uL of prewarmed KCl-enriched simplex optimization medium with amino acid supplement (KSOM+AA, Zenith Biotech ZEKS-050). An additional 100 uL flush can be used to recover any remaining embryos. Embryos are then washed three times through KSOM+BSA that has been equilibrated prior to the start of the experiment. To equilibrate, 20 uL droplets are prepared in 35×10 mm (CellStar Greiner Bio-One 627160) culture plates and allowed to incubate overnight. Embryos and KSOM+BSA are cultured in a water jacketed, 5% CO₂ incubator at 37° C. and 95% humidity.

### Vasectomy of Male Mice

[0214] Male Mice (C57BL/6J JAX 000664), between 3-8 mo of ages, mice are anesthetized with Ketamine 65 mg/kg+Xylazine 13 mg/kg+accepromazine 2 mg/kg mix in sterile 0.9% NaCl solution and place on their backs to expose the abdomen when deeply narcotized. The abdomen is cleaned with 70% ethanol, and a 1.0 cm transverse incision is made in the ventro-distal abdomen to expose the fat pads that overlay the testis and vas deferens. The fatpads are grasped using sterile forceps to further expose both vas deferentia, which are then cauterized. Testis, fat pads and vas deferentia are replaced back into the abdominal cavity. Following this, the abdominal wall is sutured with 3-0 or 4-0 PDS-II taper. The skin incision is then closed using surgical staples. Post-surgical care includes close monitoring and a heating pad to avoid hypothermia until the male awakens from anesthesia. To test fertility, males are mated to supoerovulated or naturally ovulated females. A minimum of two plugged non-pregnant females are required to indicate a successful vasectomy.

Implantation of Embryos into PseudoPregnant Female Mice

[0215] Females are placed with vasectomized males and copulation plugs are checked in the next morning o. Plugged females are anesthetized with Ketamine 65 mg/kg+Xylazine 13 mg/kg+accepromazine 2 mg/kg mix in sterile 0.9% NaCl solution, and placed on their stomachs in order to expose the lumbar area for surgery. Fur over the left or right lumbar area is sprayed with 70% ethanol, where a 1 cm or smaller incision is made with sterile scissors. The fat pad overlaying the ovary is grasped with a sterile pair of forceps and pulled until the fatpad, ovary, oviduct and distal end of the uterine horn is exteriorized. 2-cell embryos can be transferred into the oviduct via the infundibulum. The tip of the glass transfer pipette is inserted into the infundibulum, and gentle pressure is applied to place embryos into the oviduct. Following transfer, the incision is sutured and female mouse is monitored.

### Results

### CRISPR-EZ Efficiently Generates Indel Mutations by the NHEJ Repair Pathway

[0216] To overcome the costly and laborious nature of the microinjection-based technology, CRISPR-EZ, a highly accessible, electroporation-based method, was developed to deliver Cas9/sgRNA RNP complex in mouse zygotes for in vivo genome editing. Prior to electroporation, C57B6/J mouse zygotes were collected from the oviducts of superovulated female mice, briefly treated with hyaluronidase to remove cumulus cells, and washed for 30 seconds with acid Tyrode's solution to weaken the zona pellucida. ˜30-40 pre-treated mouse zygotes were then combined with preassembled Cas9/sgRNA RNP complexes for electroporation (e.g., 30V, 1 ms pulse duration, 2 pulses, 1 ms pulse interval). Finally, electroporated embryos were either cultured to the 2-cell stage before transferred to the oviducts of pseudopregnant recipient females or cultured to the morula stage for genotyping analysis (FIG. 1A).

[0217] To optimize electroporation conditions for efficient Cas9/sgRNA RNP delivery into mouse zygotes, a sgRNA was selected, which sgRNA induces NHEJ-mediated mutations into exon 1 of the tyr gene (FIG. 1B)⁴⁰, which is predicted to ablate a HinfI restriction site 1 nt upstream of the Protospacer Adjacent Motif (PAM) (FIG. 1C). The genome editing efficiency and embryo survival rates were determined in CRISPR-EZ experiments at various RNP concentrations (16 μM or 8 μM) and electroporation pulse lengths (1 millisecond (msec), 3 msec, or 10 msec) (FIGS. 1D and 1E). Electroporated embryos were cultured to the morula stage and subjected to a restriction fragment length polymorphism (RFLP) assay for genotyping (FIG. 1A). While CRISPR-EZ at 1 msec pulse length yielded mostly partially edited embryos, 3 msec and 10 msec conditions resulted in mostly bi-allelic editing that were sequence confirmed (83-100%, FIGS. 1D and 1E; Table 1). Notably, 3 msec and 10 msec conditions left no unedited embryos, indicating a 100% efficiency in Cas9/sgRNA RNP delivery, yet the 10 msec pulse condition, but not the 3 msec pulse condition, reduced embryo viability (Table 1). Additionally, a high RNP concentration also negatively impacts embryo survival. At the 3 msec pulse condition, the 8 μM and 16 μM RNP concentrations both resulted in mostly bi-allelic editing (67% and 83% respectively), but the 8 μM condition enabled 2.4-fold greater embryo survival (60% and 25%, respectively). Thus, using 8 μM Cas9/sgRNA RNP for electroporation at a single pulse length of 3 msec achieved the best balance between CRISPR editing efficiency and embryo survival (67% bi-allelic editing and 60% embryo survival). Compared to microinjection-based technology, this optimized CRISPR-EZ condition yields a comparable editing efficiency, yet significantly improve the embryo survival rate (60% for CRISPR-EZ versus 30% for microinjection) (FIG. 1F).

[0218] To evaluate the robustness of the CRISPR-EZ technology, three additional genes, cdh1, cdk8, and kif11, were edited in mouse zygotes. In each case, sgRNAs were designed to target a restriction site 3-4 nucleotides (nt) upstream of the PAM, thus allowing us to assess NHEJ editing efficiency by RFLP analyses. While CRISPR-EZ editing efficiency varies with the different sgRNA design, at least 50% of mouse embryos exhibited desired editing for each gene (FIG. 1G, Table 2), which were subsequently confirmed by sequencing (FIG. 1H). Thus, CRISPR-EZ efficiently delivers Cas9/sgRNA RNP complexes to introduce indel mutations through the NHEJ repair pathway.

[0219] FIG. 1A-1H. CRISPR-EZ Generates NHEJ-Mediated Indel Mutations.

[0220] A. Overview of CRISPR-EZ and RFLP analysis Workflow. Fertilized embryos are combined with pre-assembled Cas9/sgRNA RiboNucleoProtein (RNP) complexes prior to electroporation. Following this, embryos were either cultured to the morula stage of preimplantation development to assess for editing efficiency via restriction fragment length polymorphism assay, or embryos are transferred to pseudopregnant females to generate edited animals. B. Diagram of tyr gene structure, sgRNA design and Genotyping Strategy. The sgRNA (orange) hybridizes within the open reading frame in exon 1. A HinfI restriction site is located 1 nt upstream of the protospacer adjacent motif (PAM), where Cas9 is predicted to cleave. Upon successful Non Homologous End Joining (NHEJ) repair outcomes, this restriction site is predicted to be disrupted and no longer a substrate for HinfI. Arrows indicate position of primers used for polymerase chain reaction (PCR). C. Representative outcome of genotyping strategy applied to a Cas9 mRNA microinjection of embryo based editing approach. Embryos were lysed at the morula stage, subjected to nested PCR, and digested with HinfI for 2 hours. Complete digestion by HinfI generates two ˜100 nt digestion products that migrate together as a single lower band. Absence of this lower band was used to determine the degree of editing. Presence of both digested and undigested product suggest mono-allelic or mosaic editing events. Top: PCR amplicons from 1 control (unedited) and 11 recovered Morula staged embryos following microinjection of Cas9 mRNA+sgTyr sgRNA at the pronucleus stage. Bottom: RFLP analysis using HinfI restriction enzyme of identical nested PCR amplicons as top part of image. D. Determining optimal pulse length. Three different electroporation pulse conditions were compared with constant RNP concentration (16 μM). Analysis was performed as described in C. Quantification of results are displayed on right-most panel. E. Determining optimal pulse length at lower RNP concentration. Three different electroporation pulse conditions were compared with constant RNP concentration (8 μM). Analysis was performed as described in previous panel. Quantification of results is displayed on right-most panel. F. Comparison of embryo viability following sgRNA/Cas9 mRNA microinjection and Electroporation of RNP complex at various pulse length and RNP concentration conditions. Percent survival was assessed by first determining the number of embryos that were able to reach the 2-Cell stage (evidence for fertilization), and subsequently the number of these 2-Cell embryos that developed to the Morula stage without arresting prior to collection. G. RFLP analysis of editing efficiency of sgRNAs targeting Cdh1, Cdk8 and Kif11. The efficiency of three additional sgRNAs was tested using the optimized conditions determined above to yield highest editing and viability of electroporated embryos. Restriction enzymes used to determine editing efficiencies were XmaI for Cdh1, EcoNI for Cdk8 and BsII for Kif11. H: Sequence verification of Tyr, Cdh1, Cdk8 and Kif11 sgRNA editing events. Nested PCR products from suspected edited embryos were gel extracted, cloned, and sequenced. The recovered sequences were then aligned to the appropriate unedited sequence to display the NHEJ repair outcome of each sgRNA/Cas9 mediated double strand break. At least two distinct insertion/deletion repair events were recovered for each sgRNA tested.

### CRISPR-EZ Efficiently Generates Precise Mutations by HDR in Live Mice

[0221] Next, it was determined whether CRISPR-EZ can be employed to introduce specific point mutations through the HDR pathway. A 92 nt ssDNA donor oligonucleotide (“oligo”) was designed, which oligo enables the substitution of the endogenous HinfI site for an EcoRI site in tyr exon1, causing an early termination of the open reading frame (ORF) and generating a null tyr allele (FIG. 2A). Purified Cas9 protein, in vitro transcribed sgRNA, and the ssDNA donor were combined to assemble RNPs, and obtained ˜46% efficiency for HDR in cultured morula embryos in CRISRP-EZ experiments. (FIG. 2B, also see FIG. 2G).

[0222] Tyrosinase is the rate-limiting enzyme in pigment biosynthesis, thus the extent of the albino coat color in mice is a direct readout of the efficiency of bi-allelic tyr inactivation in vivo. Any mosaicism in editing will be accurately reflected in the mosaicism of the coat color. CRISPR-EZ was performed to generate live animals that harbor the HDR-mediated tyr gene modification as described above. CRISPR-EZ was performed using 1 msec and 3 msec pulse lengths to electroporate Cas9/sgRNA RNP with donor DNA into 140 and 120 zygotes, respectively. Electroporated zygotes were then incubated in KSOM for 24 hours to reach 2-cell stage embryos, and viable 2-cell embryos were transferred to the oviducts of pseudopregnant foster mothers. The 3 msec CRISPR-EZ pulse length condition is highly efficient in genome editing, generating 88% albino mice with bi-allelic tyr editing (29/33), 9% (3/33) mosaic mice with ˜50% albino coat and 3% mouse with a partial tyr editing (FIG. 2C, Table 3). All tested edited mice are germline competent. Using RFLP analyses on isolated tail DNA, it was validated that 42% of animals harbored the HDR-mediated precise modifications (FIG. 2F). Remarkably, generated homozygous HDR-edited mice were generated that were germline competent. In comparison, the 1 msec CRISPR-EZ pulse condition, while slightly increasing the live birth rate (Table 3), only yield 41% (18/44) albino mice and 27% HDR-mediated editing (FIG. 2C, 2F, Table 3). Nevertheless, both CRISPR-EZ conditions offer a significant improvement on embryo survival compared to the microinjection-based technology to deliver Cas9 mRNA and sgRNA, and the 3 msec CRISPR-EZ pulse length condition also improves on editing efficiency as measured by the percentage of albino animals generated. Thus, CRISPR-EZ generates HDR-edited, germline competent mice with unprecedented speed and efficiency.

[0223] In addition to small sequence replacement, the CRISPR-EZ technology can also be employed to generate precise deletion or introduce a small insertion. CRISPR-EZ technology has been successfully employed to generate a ˜700 bp deletion in MeCP2 gene with nearly 70% efficiency. In addition, genetically modified mouse embryos have been generated with an insertion of a V5 tag in the oct4 gene. Taken together, CRISPR-EZ yield a greater editing efficiency, a greater embryo survival and live birth rate in in vivo genome editing, and can replace microinjection-based technology for CRISPR editing in a variety of mammalian species.

[0224] FIGS. 2A-2F. CRISPR-EZ generates HDR-mediated precise point mutations in live animals. A. Diagram of HDR targeting strategy. A 92 nt single-stranded DNA donor that substitutes the HinfI site for an EcoRI site was co-electroporated along with RNPs. Successful HDR results in a frameshift mutation leading to early termination of the polypeptide 18 nt downstream of the EcoRI site. B. Treated embryos were lysed at the morula stage, subjected to nested PCR, and digested with HinfI or EcoRI for 2 hours. Black arrows mark EcoRI digestion products, indicating HDR-mediated sequence substitution. C. Images of mouse litters obtains from CRISPR-EZ 1 msec pulse condition (left) and 3 msec pulse condition (right). D. Restriction analysis was performed using tail samples from albino mice. White arrows mark EcoRI digestion products, indicating HDR-mediated sequence substitution. E. PCR products from 1 msec pulse condition albino mice were cloned into sequencing vectors, and 8 clones from each animal were picked for sequencing. F. All sequence variants are shown for each animal, with edited sequences highlighted in pink. Red “AT” indicate sequences introduced by HDR.

[0225] Table 1 (provided in FIG. 3). Optimization of CRISRP-EZ conditions. Cas9 protein and sgRNAs were assembled at 1:1.5 molar ratio and embryos were electroporated at a final concentration of 16 μM or 8 μM. Embryos were electroporated in pools of 30 embryos using 1 msec, 3 msec, or 10 msec pulse lengths, with other parameters held constant: 2 pulses, 30 volts, 1 msec interval. Electroporated embryos were transferred to KSOM and incubated for 3 days, followed by lysis, nested PCR, and RFLP analysis. For microinjection, Cas9 mRNA and sgRNA were co-injected at 100 ng/μL and 50 ng/μL respectively, with approximately 4-5 pL injected per embryo.

[0226] Table 2 (provided in FIG. 4). CRISPR-EZ mediated editing in embryos. Cas9 protein and sgRNAs were assembled at 1:1.5 molar ratio and embryos were electroporated at a final concentration of 8 μM. Embryos were electroporated in pools of 30-35 embryos using the following conditions: 2 pulses, 3 msec pulse length, 30 volts, 1 msec interval. Electroporated embryos were transferred to KSOM and incubated for 3 days, followed by lysis, nested PCR, and RFLP analysis.

[0227] Table 3 (provided in FIG. 5A). CRISPR-EZ mediated editing of the tyr gene in live mice. Cas9 protein and sgRNAs were assembled at 1:1.5 molar ratio and embryos were electroporated at a final concentration of 8 μM. Embryos were electroporated in pools of 35 embryos using 1 msec or 3 msec pulse lengths, with other parameters held constant: 2 pulses, 30 volts, 1 msec interval. Electroporated embryos were cultured in KSOM for 24 hours before transferring the 2-cell stage embryos to the oviducts of pseudopregnant foster mothers. For microinjection, Cas9 mRNA and sgRNA were co-injected at 100 ng/μL and 50 ng/uL respectively, with approximately 4-5 pL injected per embryo.

[0228] Table 4 (provided in FIG. 5B). NHEJ and HDR-mediated editing in live mice. Tail DNA was recovered from all CRISPR-EZ edited mice generated using either a 1 msec or 3 msec pulse length protocol. DNA was amplified by nested PCR and subjected to RFLP analysis using HinfI and EcoRI to determine the genotypes of mice.

### REFERENCES

[0229] 1. Mansour, S. L., Thomas, K. R. & Capecchi, M. R. Disruption of the proto-oncogene int-2 in mouse embryo-derived stem cells: a general strategy for targeting mutations to non-selectable genes. Nature 336, 348-52 (1988).
[0230] 2. Evans, M. J. & Kaufman, M. H. Establishment in culture of pluripotential cells from mouse embryos. Nature 292, 154-156 (1981).
[0231] 3. Capecchi, M. R. Gene targeting in mice: functional analysis of the mammalian genome for the twenty-first century. Nat. Rev. Genet. 6, 507-12 (2005).
[0232] 4. Geurts, A. M. et al. Knockout rats via embryo microinjection of zinc-finger nucleases. Science 325, 433 (2009).
[0233] 5. Carbery, I. D., Ji, D., Harrington, A., Brown, V., Weinstein, E. J., Liaw, L. & Cui, X. Targeted genome modification in mice using zinc-finger nucleases. Genetics 186, 451-9 (2010).
[0234] 6. Tesson, L., Usal, C., Ménoret, S., Leung, E., Niles, B. J., Remy, S., Santiago, Y., Vincent, A. I., Meng, X., Zhang, L., Gregory, P. D., Anegon, I. & Cost, G. J. Knockout rats generated by embryo microinjection of TALENs. Nat. Biotechnol. 29, 695-6 (2011).
[0235] 7. Sung, Y. H., Baek, I.-J., Kim, D. H., Jeon, J., Lee, J., Lee, K., Jeong, D., Kim, J.-S. & Lee, H.-W. Knockout mice created by TALEN-mediated gene targeting. Nat. Biotechnol. 31, 23-4 (2013).
[0236] 8. Meyer, M., de Angelis, M. H., Wurst, W. & Kühn, R. Gene targeting by homologous recombination in mouse zygotes mediated by zinc-finger nucleases. Proc. Natl. Acad. Sci. U.S.A. 107, 15022-6 (2010).
[0237] 9. Cui, X., Ji, D., Fisher, D. A., Wu, Y., Briner, D. M. & Weinstein, E. J. Targeted integration in rat and mouse embryos with zinc-finger nucleases. Nat. Biotechnol. 29, 64-7 (2011).
[0238] 10. Carroll, D. Genome engineering with zinc-finger nucleases. Genetics 188, 773-82 (2011).
[0239] 11. Barrangou, R., Fremaux, C., Deveau, H., Richards, M., Boyaval, P., Moineau, S., Romero, D. A. & Horvath, P. CRISPR provides acquired resistance against viruses in prokaryotes. Science 315, 1709-12 (2007).
[0240] 12. Brouns, S. J. J., Jore, M. M., Lundgren, M., Westra, E. R., Slijkhuis, R. J. H., Snijders, A. P. L., Dickman, M. J., Makarova, K. S., Koonin, E. V & van der Oost, J. Small CRISPR RNAs guide antiviral defense in prokaryotes. Science 321, 960-4 (2008).
[0241] 13. Xiao, A., Wang, Z., Hu, Y., Wu, Y., Luo, Z., Yang, Z., Zu, Y., Li, W., Huang, P., Tong, X., Zhu, Z., Lin, S. & Zhang, B. Chromosomal deletions and inversions mediated by TALENs and CRISPR/Cas in zebrafish. Nucleic Acids Res. 41, e141 (2013).
[0242] 14. Niu, Y. et al. Generation of gene-modified cynomolgus monkey via Cas9/RNA-mediated gene targeting in one-cell embryos. Cell 156, 836-43 (2014).
[0243] 15. Guo, X., Zhang, T., Hu, Z., Zhang, Y., Shi, Z., Wang, Q., Cui, Y., Wang, F., Zhao, H. & Chen, Y. Efficient RNA/Cas9-mediated genome editing in Xenopus tropicalis. Development 141, 707-14 (2014).
[0244] 16. Waaijers, S., Portegijs, V., Kerver, J., Lemmens, B. B. L. G., Tijsterman, M., van den Heuvel, S. & Boxem, M. CRISPR/Cas9-targeted mutagenesis in Caenorhabditis elegans. Genetics 195, 1187-91 (2013).
[0245] 17. Gokcezade, J., Sienski, G. & Duchek, P. Efficient CRISPR/Cas9 plasmids for rapid and versatile genome editing in Drosophila. G3 (Bethesda). 4, 2279-82 (2014).
[0246] 18. Jinek, M., Chylinski, K., Fonfara, I., Hauer, M., Doudna, J. A. & Charpentier, E. A programmable dual-RNA-guided DNA endonuclease in adaptive bacterial immunity. Science 337, 816-21 (2012).
[0247] 19. Cong, L., Ran, F. A., Cox, D., Lin, S., Barretto, R., Habib, N., Hsu, P. D., Wu, X., Jiang, W., Marraffini, L. A. & Zhang, F. Multiplex genome engineering using CRISPR/Cas systems. Science 339, 819-23 (2013).
[0248] 20. Wang, H., Yang, H., Shivalila, C. S., Dawlaty, M. M., Cheng, A. W., Zhang, F. & Jaenisch, R. One-step generation of mice carrying mutations in multiple genes by CRISPR/cas-mediated genome engineering. Cell 153, 910-918 (2013).
[0249] 21. Maddalo, D., Manchado, E., Concepcion, C. P., Bonetti, C., Vidigal, J. A., Han, Y.-C., Ogrodowski, P., Crippa, A., Rekhtman, N., de Stanchina, E., Lowe, S. W. & Ventura, A. In vivo engineering of oncogenic chromosomal rearrangements with the CRISPR/Cas9 system. Nature 516, 423-427 (2014).
[0250] 22. Canver, M. C., Bauer, D. E., Dass, A., Yien, Y. Y., Chung, J., Masuda, T., Maeda, T., Paw, B. H. & Orkin, S. H. Characterization of genomic deletion efficiency mediated by clustered regularly interspaced palindromic repeats (CRISPR)/Cas9 nuclease system in mammalian cells. J. Biol. Chem. 289, 21312-24 (2014).
[0251] 23. Yang, H., Wang, H., Shivalila, C. S., Cheng, A. W., Shi, L. & Jaenisch, R. One-step generation of mice carrying reporter and conditional alleles by CRISPR/Cas-mediated genome engineering. Cell 154, 1370-9 (2013).
[0252] 24. Irion, U., Krauss, J. & Nüsslein-Volhard, C. Precise and efficient genome editing in zebrafish using the CRISPR/Cas9 system. Development 141, 4827-30 (2014).
[0253] 25. Gratz, S. J., Cummings, A. M., Nguyen, J. N., Hamm, D. C., Donohue, L. K., Harrison, M. M., Wildonger, J. & O'Connor-Giles, K. M. Genome engineering of Drosophila with the CRISPR RNA-guided Cas9 nuclease. Genetics 194, 1029-35 (2013).
[0254] 26. Bassett, A. R., Tibbit, C., Ponting, C. P. & Liu, J.-L. Highly Efficient Targeted Mutagenesis of Drosophila with the CRISPR/Cas9 System. Cell Rep. 6, 1178-1179 (2014).
[0255] 27. Wang, H., Yang, H., Shivalila, C. S., Dawlaty, M. M., Cheng, A. W., Zhang, F. & Jaenisch, R. One-step generation of mice carrying mutations in multiple genes by CRISPR/Cas-mediated genome engineering. Cell 153, 910-8 (2013).
[0256] 28. Qin, W., Dion, S. L., Kutny, P. M., Zhang, Y., Cheng, A., Jillette, N. L., Malhotra, A., Geurts, A. M., Chen, Y.-G. & Wang, H. Efficient CRISPR/Cas9-Mediated Genome Editing in Mice by Zygote Electroporation of Nuclease. Genetics (2015). doi:10.1534/genetics.115.176594
[0257] 29. Takahashi, G., Gurumurthy, C. B., Wada, K., Miura, H., Sato, M. & Ohtsuka, M. GONAD: Genome-editing via Oviductal Nucleic Acids Delivery system: a novel microinjection independent genome engineering method in mice. Sci. Rep. 5, 11406 (2015).
[0258] 30. Hashimoto, M. & Takemoto, T. Electroporation enables the efficient mRNA delivery into the mouse zygotes and facilitates CRISPR/Cas9-based genome editing. Sci. Rep. 5, 11315 (2015).
[0259] 31. Yen, S.-T., Zhang, M., Deng, J. M., Usman, S. J., Smith, C. N., Parker-Thornburg, J., Swinton, P. G., Martin, J. F. & Behringer, R. R. Somatic mosaicism and allele complexity induced by CRISPR/Cas9 RNA injections in mouse zygotes. Dev. Biol. 393, 3-9 (2014).
[0260] 32. Gasiunas, G., Barrangou, R., Horvath, P. & Siksnys, V. Cas9-crRNA ribonucleoprotein complex mediates specific DNA cleavage for adaptive immunity in bacteria. Proc. Natl. Acad. Sci. U.S.A 109, E2579-86 (2012).
[0261] 33. Nishimasu, H., Ran, F. A., Hsu, P. D., Konermann, S., Shehata, S. I., Dohmae, N., Ishitani, R., Zhang, F. & Nureki, O. Crystal structure of Cas9 in complex with guide RNA and target DNA. Cell 156, 935-49 (2014).
[0262] 34. Jinek, M., Jiang, F., Taylor, D. W., Sternberg, S. H., Kaya, E., Ma, E., Anders, C., Hauer, M., Zhou, K., Lin, S., Kaplan, M., Iavarone, A. T., Charpentier, E., Nogales, E. & Doudna, J. A. Structures of Cas9 endonucleases reveal RNA-mediated conformational activation. Science 343, 1247997 (2014).
[0263] 35. Cho, S. W., Lee, J., Carroll, D., Kim, J.-S. & Lee, J. Heritable gene knockout in Caenorhabditis elegans by direct injection of Cas9-sgRNA ribonucleoproteins. Genetics 195, 1177-80 (2013).
[0264] 36. Lee, J.-S., Kwak, S.-J., Kim, J., Kim, A.-K., Noh, H. M., Kim, J.-S. & Yu, K. RNA-guided genome editing in Drosophila with the purified Cas9 protein. G3 (Bethesda). 4, 1291-5 (2014).
[0265] 37. Kim, S., Kim, D., Cho, S. W., Kim, J. & Kim, J.-S. Highly efficient RNA-guided genome editing in human cells via delivery of purified Cas9 ribonucleoproteins. Genome Res. 24, 1012-9 (2014).
[0266] 38. Lin, S., Staahl, B., Alla, R. K. & Doudna, J. A. Enhanced homology-directed human genome engineering by controlled timing of CRISPR/Cas9 delivery. Elife 3, e04766 (2014).
[0267] 39. Schumann, K., Lin, S., Boyer, E., Simeonov, D. R., Subramaniam, M., Gate, R. E., Haliburton, G. E., Ye, C. J., Bluestone, J. A., Doudna, J. A. & Marson, A. Generation of knock-in primary human T cells using Cas9 ribonucleoproteins. Proc. Natl. Acad. Sci. 112, 201512503 (2015).
[0268] 40. Mizuno, S., Dinh, T. T. H., Kato, K., Mizuno-Iijima, S., Tanimoto, Y., Daitoku, Y., Hoshino, Y., Ikawa, M., Takahashi, S., Sugiyama, F. & Yagami, K. Simple generation of albino C57BL/6J mice with G291T mutation in the tyrosinase gene by the CRISPR/Cas9 system. Mamm. Genome 25, 327-34 (2014).

### Example 2: Deletion of a Retrotransposon Found Upstream of Cdk2ap1

[0269] To investigate a potential regulatory and structural effect elicited on the protein coding gene Cdk2ap1 by the nearby and upstream retrotransposon (RT) element MT2C_Mm, a CRISPR/Cas9-based genome editing strategy was developed to remove the RT as well as any effect it might have on Cdk2ap1.

[0270] The hypothesized relationship between Cdk2ap1 and MT2C_Mm that is to be disrupted is one in which the RT sequence has been co-opted by the genome as an alternative promoter and 5′ UTR for Cdk2ap1. In addition to harboring appropriately utilized splicing signals, the novel chimeric splice isoform enables the use of a downstream start codon, effectively truncating the protein product by 27 amino acids, while leaving the remaining downstream 87 amino acids intact and in-frame. Using a pair of small guide RNAs (sgRNAs) flanking the RT, a 1083 bp deletion is generated. This event will be tracked using primers designed to distinguish edited and unedited cells and tissues (FIG. 9B). As additional evidence of the presence of this particular chimeric transcript, primers designed to target this specific splicing event were generated and used on a cDNA sample template predicted to possess this isoform. The resulting amplicon was isolated and subcloned for sequencing analysis. The predicted splicing event was recovered in precisely the manner predicted.

### Example 3: CRISPR-EZ Efficiency In Vivo

[0271] A variety of experimental conditions to test CRISPR-EZ efficiency in mice have been performed. In addition to optimizing Cas9 concentration and pulse length in vitro, optimization in vivo the number of electroporation pulses required to achieve the best balance between editing efficiency and animal viability was tested. Using a Tyr targeting strategy, CRISPR-EZ was performed using 2, 4, 6, or 8 pulses (30 volts, 3 msec) followed by transfer of the electroporated embryos into pseudopregnant recipient females. Coat color of the resulting animals was quantified to determine editing efficiency: an albino coat indicates complete biallelic editing, a mosaic coat containing patches of white and black indicates biallelic Tyr disruption in only some cells, and a black coat indicates heterozygous or unedited animals. For the 6-pulse condition, 16/16 live animals were completely albino, suggesting 100% biallelic disruption of Tyr (FIG. 10A). Furthermore, this condition did not appreciably compromise animal viability—out of 34 embryos transferred, 16 pups were born (47%) (FIG. 10A). Thus, 6 pulses provide a balance of editing efficiency and animal viability for C57B6/J strain mice.

[0272] Multiple embryos can be simultaneously electroporated in one cuvette at the push of a button. In contrast, a microinjection experiment can take hours even in the hands of a skilled technician, since zygotes must be individually injected one at a time. To test the throughput of CRISPR-EZ, the Tyr gene was targeted on pools of 35, 60, or 100 embryos in a single cuvette, using the following electroporation conditions: 30 volts, 3 msec, 4 pulses. Up to 100 embryos could be simultaneously treated without a reduction in editing efficiency or viability (FIG. 10B).

[0273] The next steps were to reproduce the results from C57B/6J mice in a different yet related C57B/6N strain. For both 2 pulse and 6 pulses conditions, editing of the Tyr gene in C57B/6N closely matched efficiencies obtained from C57B/6J, demonstrating that CRISPR-EZ can be applied to other mouse strains with minimal optimization (FIG. 10C). The CRISPR-EZ was able to adapt to different mouse strains.

[0274] Next, the robustness of CRISPR-EZ vs. microinjection in generating knock-out mice in a high throughput manner was compared. In this experiment, Cas9 RNPs consisting of 4 sgRNAs (2 upstream and 2 downstream) flanking a key exon were introduced into zygotes by CRISPR-EZ or pronuclear microinjection, followed by embryo transfer into pseudopregnant recipient females to generate live animals. Gene editing resulted in deletion of the intervening sequences, which was genotyped by PCR and sequencing of tail DNA. CRISPR-EZ outperformed microinjection—while ˜9% of animals were edited by microinjection, ˜25% of animals were edited by CRISPR-EZ (FIG. 10D). Furthermore, ˜50% of genes targeted by microinjection produced at least one correctly edited animal, in contrast with ˜80% by CRISPR-EZ (FIG. 10D). Notably, all these experiments were carried out in C57B/6N strain mice.

[0275] The CRISPR-EZ technique generated multiple genome editing schemes in mice and in embryos, including indels in Cdk8, Cdh1 and Kif11, deletion of putative regulatory elements or gene exons in the Cdk2ap1, Rpl41, Ubtfl1, Zscan4D, MeCP2, Pou5f1, Spin1 genes, insertion of an V5 tag to the Sox2 gene, introduction of point mutations to the Tyr gene (FIG. 11, FIG. 12). CRISPR-EZ was used to produce genetically modified mice to make a point mutation by homology directed repair (HDR) in the major histocompatibility gene H-2 Ld. Additionally, germline competent edited mice using CRISPR-EZ (FIG. 11) were generated. CRISPR-EZ was also used to make a point mutation in the Abhd2 gene using homology directed repair (HDR) (FIG. 11).

[0276] FIG. 9A-9C. Deletion of retrotransposon found upstream of Cdk2ap1. A) Schematic of the organization between the Non-Coding Retrotransposon “MT2C_Mm” and the Protein Coding Gene “Cdk2ap1”. Features included, from left to right: Upstream small guide RNA (sgRNA), Annotation of MT2C_Mm including predicted Transcriptional Start Site (TSS), downstream sgRNA, Exon 1 of Cdk2ap1 with TSS and Start Codon (ATG). Exon 2 with alternative Start Codon, Remaining unaltered exons of CDk2ap1. Blue and Red lines represent splice junctions of protein coding exons and RT derived exons, respectively. B) Genotyping strategy for determining the presence or absence of the deleted alleles. C) Sequencing confirmation of splice junction between MT2C_Mm and Exon 2 of CDK2ap1. Ten nucleotides on either side of junction are shown along with chromatogram trace.

[0277] FIG. 10A-D. Optimization of CRISPR-EZ efficiency, throughput, and robustness to enhance genome editing efficiency and survival. FIG. 10A. Electroporation pulse number was optimized in CRISPR-EZ experiments using C57B/6J mice. CRISPR-EZ targeting the Tyr gene was performed using 2, 4, 6, or 8 pulses of 30 volts at 3 ms. Electroporated embryos were transferred into pseudopregnant recipient females that gave birth to edited animals. 6 pulses offered maximal editing efficiency (left) as indicated by albino coat color, with minimal reduction in animal viability (right). Coat color of the resulting animals was quantified to determine editing efficiency: an albino coat indicates complete biallelic editing, a mosaic coat containing patches of white and black indicates biallelic Tyr disruption in only some cells, and a black coat indicates heterozygous or unedited animals. FIG. 10B. The number of embryos that can be simultaneously electroporated was investigated using C57B/6J mice. Simultaneous electroporation of 35, 60, or 100 zygotes (30 volts, 3 ms, 4 pulses) was performed in one electroporation cuvette, followed by transfer of a portion of the embryos into recipient females. For up to 100 embryos, there was no observed reduction in editing efficiency (left) or animal viability (right). FIG. 10C. Robustness across different mouse strains for CRISPR-EZ genome editing was tested.

[0278] CRISPR-EZ was performed on two different mouse strains (C57B/6J or C57/6N) using 2 or 6 pulses. Similar editing efficiency was achieved for both mouse strains under similar conditions, suggesting that CRISPR-EZ can be adapted to other mouse strains. FIG. 10D. Comparison between CRISPR-EZ and pronuclear microinjection in generating knock-out mice in C57/6N strains. 20 genes and 15 genes were tested by microinjection and CRISPR-EZ, respectively. For each gene, 2 sgRNAs upstream and 2 sgRNAs downstream of a key exon were introduced into zygotes by microinjection or CRISPR-EZ, such that successful editing results in deletion of the targeted exon. Treated embryos were then transferred to recipient females, and editing in the resulting pups was assessed by PCR. “Success rate” is defined as the percent of genes for which at least one edited mouse was obtained. “Animal editing rate” is defined as the percent of animals carrying an edited allele.

[0279] FIG. 11 provides a table showing that CRISPR-EZ generates live mice harboring a variety of editing schemes. Zygotes were collected from superovulated females, treated by CRISPR-EZ, and transferred to pseudopregnant recipient females that gave birth to edited mice. Editing was confirmed by sequencing and animals were germline competent.

[0280] FIG. 12 provides a table showing that CRISPR-EZ generates a variety of editing schemes in vitro. CRISPR-EZ was performed on zygotes harvested from superovulated females Zygotes were then cultured to morula stage; the morula were subjected to restriction fragment length polymorphism analysis and sequencing to assess editing.

[0281] While the present invention has been described with reference to the specific embodiments thereof, it should be understood by those skilled in the art that various changes may be made and equivalents may be substituted without departing from the true spirit and scope of the invention. In addition, many modifications may be made to adapt a particular situation, material, composition of matter, process, process step or steps, to the objective, spirit and scope of the present invention. All such modifications are intended to be within the scope of the claims appended hereto.

What is claimed is:

1. A method of modifying genomic DNA of a mammalian zygote, the method comprising introducing into the zygote a ribonucleoprotein (RNP) comprising a class 2 CRISPR/Cas endonuclease complexed with a corresponding CRISPR/Cas guide RNA that hybridizes to a target sequence within the genomic DNA of the zygote, wherein said introducing is by electroporation of an electroporation composition comprising the RNP and the zygote, and wherein said introducing results in modification of the genomic DNA.

2. The method of claim 1, wherein the class 2 CRISPR/Cas endonuclease is a type II CRISPR/Cas endonuclease.

3. The method of claim 1 or claim 2, wherein the class 2 CRISPR/Cas endonuclease is a Cas9 polypeptide and the corresponding CRISPR/Cas guide RNA is a Cas9 guide RNA.

4. The method of claim 3, wherein the Cas9 guide RNA is a single guide RNA (sgRNA).

5. The method of claim 1, wherein the RNP comprises two or more CRISPR/Cas guide RNAs.

6. The method of claim 1, wherein the class 2 CRISPR/Cas endonuclease is a type V or type VI CRISPR/Cas endonuclease.

7. The method of claim 6, wherein the class 2 CRISPR/Cas polypeptide is a Cpf1 polypeptide, a C2c1 polypeptide, a C2c3 polypeptide, or a C2c2 polypeptide.

8. The method of any one of claims 1-7, wherein modification of the genomic DNA is homozygous modification.

9. The method of any one of claims 1-7, wherein modification of the genomic DNA is heterozygous modification.

10. The method of any one of claims 1-7, wherein the modification comprises deletion of genomic DNA, insertion of a nucleic acid into the genomic DNA, or both deletion of genomic DNA and insertion of a nucleic acid into the genomic DNA.

11. The method of any one of claims 1-7, wherein the modification comprises inversion of genomic DNA.

12. The method of any one of claims 1-7, wherein the modification comprises insertion of a nucleic acid into genomic DNA.

13. The method of any one of claims 1-7, wherein the modification comprises replacement of genomic DNA.

14. The method of claim 12 or claim 13, comprising introducing into the zygote a donor DNA.

15. The method of any one of claims 1-14, wherein the zygote is a rodent zygote.

16. The method of claim 15, wherein the zygote is a mouse zygote or a rat zygote.

17. The method of any one of claims 1-14, wherein the zygote is a rabbit zygote, a cat zygote, a dog zygote, or a horse zygote.

18. The method of any one of claims 1-14, wherein the zygote is an ungulate zygote.

19. The method of any one of claims 1-14, wherein the zygote is a human zygote.

20. The method of any one of claims 1-14, wherein the zygote is a non-human primate zygote.

21. The method of any one of claims 1-20, wherein the electroporation comprises:
a) combining, in an electroporation container a zygote or a plurality of zygotes in a suitable liquid medium with an equal volume of an RNP complex, forming a zygote/RNP complex composition; and b) electroporating the zygote/RNP complex composition with one or more pulses at 30 V, wherein each of the one or more pulses is a 1-millisecond to 6 millisecond pulse.

22. The method of claim 21, wherein said electroporation comprises electroporating with 2 or more pulses at 30 V, wherein each of the 2 or more pulses is a 3-millisecond pulse.

23. The method of claim 21, wherein said electroporation comprises electroporating with 6 pulses of 30 V each, wherein each of the 6 pulses is a 3-millisecond pulse.

24. The method of any one of claims 1-23, wherein the RNP is present in the electroporation composition at a concentration of from 5 μM to 16 μM.

25. The method of any one of claims 1-23, wherein the RNP is present in the electroporation composition at a concentration of 8 μM.

26. The method of any one of claims 1-25, wherein at least 50%, at least 60%, at least 70%, at least 80%, at least 85%, at least 90%, at least 95%, or at least 98%, of the zygotes are viable after electroporation with the RNP.

27. The method of any one of claims 1-26, wherein the genomic modification occurs via homology-directed repair (HDR) or non-homologous end joining (NHEJ).

28. The method of any one of claims 1-27, wherein the genomic modification occurs via HDR, and wherein the efficiency of HDR is at least 50%, at least 60%, at least 70%, at least 80%, at least 90%, or 100%.

29. The method of any one of claims 1-27, wherein the genomic modification occurs via NHEJ, and wherein the efficiency of NHEJ is at least 50%, at least 60%, at least 70%, at least 80%, at least 90%, or 100%.

30. A method of modulating transcription in a mammalian zygote, the method comprising introducing into the zygote a ribonucleoprotein (RNP) comprising an enzymatically inactive CRISPR/Cas9 polypeptide complexed with a CRISPR/Cas guide RNA that hybridizes to a target sequence within the genomic DNA of the zygote, wherein said introducing is by electroporation of an electroporation composition comprising the RNP and the zygote, and wherein said introducing results in modulation of transcription of a gene comprising the target sequence.

31. The method of claim 30, wherein the zygote is a rodent zygote.

32. The method of claim 30, wherein the zygote is a mouse zygote or a rat zygote.

33. The method of claim 30, wherein the zygote is a rabbit zygote, a cat zygote, a dog zygote, or a horse zygote.

34. The method of claim 30, wherein the zygote is an ungulate zygote.

35. The method of claim 30, wherein the zygote is a human zygote.

36. The method of claim 30, wherein the zygote is a non-human primate zygote.

37. The method of any one of claims 30-36, wherein the electroporation comprises:
a) combining, in an electroporation container a zygote or a plurality of zygotes in a suitable liquid medium with an equal volume of an RNP complex, forming a zygote/RNP complex composition; and b) electroporating the zygote/RNP complex composition with one or more pulses at 30 V, wherein each of the one or more pulses is a 1-millisecond to 6 millisecond pulse.

38. The method of claim 37, wherein said electroporation comprises electroporating with 2 or more pulses at 30 V, wherein each of the 2 or more pulses is a 3-millisecond pulse.

39. The method of claim 37, wherein said electroporation comprises electroporating with 6 pulses of 30 V each, wherein each of the 6 pulses is a 3-millisecond pulse.

40. A method of labelling a genomic DNA in a mammalian zygote, the method comprising introducing into the zygote a ribonucleoprotein (RNP) comprising an enzymatically inactive CRISPR/Cas9 polypeptide complexed with a CRISPR/Cas guide RNA that hybridizes to a target sequence within the genomic DNA of the zygote, wherein said introducing is by electroporation of an electroporation composition comprising the RNP and the zygote, and wherein said introducing results in labelling of the genomic DNA.

41. The method of claim 40, wherein the zygote is a rodent zygote.

42. The method of claim 41, wherein the zygote is a mouse zygote or a rat zygote.

43. The method of claim 40, wherein the zygote is a rabbit zygote, a cat zygote, a dog zygote, or a horse zygote.

44. The method of claim 40, wherein the zygote is an ungulate zygote.

45. The method of claim 40, wherein the zygote is a human zygote.

46. The method of claim 40, wherein the zygote is a non-human primate zygote.

47. The method of any one of claims 40-46, wherein the electroporation comprises:
a) combining, in an electroporation container a zygote or a plurality of zygotes in a suitable liquid medium with an equal volume of an RNP complex, forming a zygote/RNP complex composition; and b) electroporating the zygote/RNP complex composition with one or more pulses at 30 V, wherein each of the one or more pulses is a 1-millisecond to 6 millisecond pulse.

48. The method of claim 47, wherein said electroporation comprises electroporating with 2 or more pulses at 30 V, wherein each of the 2 or more pulses is a 3-millisecond pulse.

49. The method of claim 47, wherein said electroporation comprises electroporating with 6 pulses of 30 V each, wherein each of the 6 pulses is a 3-millisecond pulse.

50. A method of delivering a ribonucleoprotein (RNP) complex into a mammalian zygote, the method comprising electroporating a composition comprising the mammalian zygote and the RNP complex, thereby delivering the RNP complex into the zygote.

51. The method of claim 50, wherein the RNP complex comprises an siRNA, an shRNA, a modified RNA, or a DNA nucleic acid.

52. A method of delivering a nucleic acid into a mammalian zygote, the method comprising electroporating a composition comprising the mammalian zygote and the nucleic acid, thereby delivering the nucleic acid into the zygote.

53. A method of delivering a polypeptide into a mammalian zygote, the method comprising electroporating a composition comprising the mammalian zygote and the polypeptide, thereby delivering the polypeptide into the zygote.

54. The method of any one of claims 50-53, wherein the zygote is a rodent zygote.

55. The method of claim 54, wherein the zygote is a mouse zygote or a rat zygote.

56. The method of any one of claims 50-53, wherein the zygote is a rabbit zygote, a cat zygote, a dog zygote, or a horse zygote.

57. The method of any one of claims 50-53, wherein the zygote is an ungulate zygote.

58. The method of any one of claims 50-53, wherein the zygote is a human zygote.

59. The method of any one of claims 50-53, wherein the zygote is a non-human primate zygote.

60. The method of any one of claims 50-53, wherein the electroporation comprises:
a) combining, in an electroporation container a zygote or a plurality of zygotes in a suitable liquid medium with an equal volume of the RNP complex, the nucleic acid, or the polypeptide, forming an electroporation composition; and b) electroporating the electroporation composition with one or more pulses at 30 V, wherein each of the one or more pulses is a 1-millisecond to 6 millisecond pulse.

61. The method of claim 60, wherein electroporation comprises electroporating with 2 or more pulses at 30 V, wherein each of the 2 or more pulses is a 3-millisecond pulse.

62. The method of claim 60, wherein electroporation comprises electroporating with 6 pulses of 30 V each, wherein each of the 6 pulses is a 3-millisecond pulse.

The application's sequence listing, which the Patent Office published only in electronic form, follows.

SEQUENCE LISTING (1154 sequences)

SEQ ID NO: 1 - protein, 15 aa, artificial sequence
  Synthetic sequence
IGLDIGTNSVGWAVI

SEQ ID NO: 2 - protein, 8 aa, artificial sequence
  Synthetic sequence
IVIEMARE

SEQ ID NO: 3 - protein, 27 aa, artificial sequence
  Synthetic sequence
DVDHIVPQSFLKDDSIDNKVLTRSDKN

SEQ ID NO: 4 - protein, 8 aa, artificial sequence
  Synthetic sequence
HHAHDAYL

SEQ ID NO: 5 - protein, 1368 aa, Streptococcus pyogenes [sequence omitted]

SEQ ID NO: 6 - protein, 1367 aa, Streptococcus pyogenes
MDKKYSIGLDIGTNSVGWAVITDDYKVPSKKLKVLGNTDRHGIKKNLIGALLFDSGETAEATRLKRTARRRYTRRKNRICYLQEIFSNEMAKVDDSFFHRLEESFLVEEDKKHERHPIFGNIVDEVAYHEKYPTIYHLRKKLADSTDKVDLRLIYLALAHMIKFRGHFLIEGDLNPDNSDVDKLFIQLVQTYNQLFEENPINASRVDAKAILSARLSKSRRLENLIAQLPGEKKNGLFGNLIALSLGLTPNFKSNFDLAEDAKLQLSKDTYDDDLDNLLAQIGDQYADLFLAAKNLSDAILLSDILRVNSEITKAPLSASMIKRYDEHHQDLTLLKALVRQQLPEKYKEIFFDQSKNGYAGYIDGGASQEEFYKFIKPILEKMDGTEELLAKLNREDLLRKQRTFDNGSIPYQIHLGELHAILRRQEDFYPFLKDNREKIEKILTFRIPYYVGPLARGNSRFAWMTRKSEETITPWNFEEVVDKGASAQSFIERMTNFDKNLPNEKVLPKHSLLYEYFTVYNELTKVKYVTEGMRKPAFLSGEQKKAIVDLLFKTNRKVTVKQLKEDYFKKIECFDSVEISGVEDRFNTSLGTYHDLLKIIKDKDFLDNEENEDILEDIVLTLTLFEDKEMIEERLKKYANLFDDKVMKQLKRRHYTGWGRLSRKLINGIRDKQSGKTILDFLKSDGFANRNFMQLINDDSLTFKEAIQKAQVSGQGHSLHEQIANLAGSPAIKKGILQTVKIVDELVKVMGHKPENIVIEMARENQTTQKGQKNSRERMKRIEEGIKELGSQILKEHPVENTQLQNEKLYLYYLQNGRDMYVDQELDINRLSDYDVDHIVPQSFLKDDSIDNKVLTRSDKNRGKSDNVPSEEVVKKMKNYWRQLLNAKLITQRKFDNLTKAERGGLSELDKAGFIKRQLVETRQITKHVAQILDSRMNTKYDENDKLIREVKVITLKSKLVSDFRKDFQFYKVREINNYHHAHDAYLNAVVGTALIKKYPKLESEFVYGDYKVYDVRKMIAKSEQEIGKATAKYFFYSNIMNFFKTEITLANGEIRKRPLIETNGETGEIVWDKGRDFATVRKVLSMPQVNIVKKTEVQTGGFSKESILPKRNSDKLIARKKDWDPKKYGGFDSPTVAYSVLVVAKVEKGKSKKLKSVKELLGITIMERSSFEKNPIDFLEAKGYKEVRKDLIIKLPKYSLFELENGRKRMLASAGELQKGNELALPSKYVNFLYLASHYEKLKGSPEDNEQKQLFVEQHKHYLDEIIEQISEFSKRVILADANLDKVLSAYNKHRDKPIREQAKNIIHLFTLTNLGAPAAFKYFDTTIERNRYKSIKEVLDATLIHQSITGLYEIRIDLSQLGGD

SEQ ID NO: 7 - protein, 1056 aa, Pasteurella multocida
MQTTNLSYILGLDLGIASVGWAVVEINENEDPIGLIDVGVRIFERAEVPKTGESLALSRRLARSTRRLIRRRAHRLLLAKRFLKREGILSTIDLEKGLPNQAWELRVAGLERRLSAIEWGAVLLHLIKHRGYLSKRKNESQTNNKELGALLSGVAQNHQLLQSDDYRTPAELALKKFAKEEGHIRNQRGAYTHTFNRLDLLAELNLLFAQQHQFGNPHCKEHIQQYMTELLMWQKPALSGEAILKMLGKCTHEKNEFKAAKHTYSAERFVWLTKLNNLRILEDGAERALNEEERQLLINHPYEKSKLTYAQVRKLLGLSEQAIFKHLRYSKENAESATFMELKAWHAIRKALENQGLKDTWQDLAKKPDLLDEIGTAFSLYKTDEDIQQYLTNKVPNSVINALLVSLNFDKFIELSLKSLRKILPLMEQGKRYDQACREIYGHHYGEANQKTSQLLPAIPAQEIRNPVVLRTLSQARKVINAIIRQYGSPARVHIETGRELGKSFKERREIQKQQEDNRTKRESAVQKFKELFSDFSSEPKSKDILKFRLYEQQHGKCLYSGKEINIHRLNEKGYVEIDHALPFSRTWDDSFNNKVLVLASENQNKGNQTPYEWLQGKINSERWKNFVALVLGSQCSAAKKQRLLTQVIDDNKFIDRNLNDTRYIARFLSNYIQENLLLVGKNKKNVFTPNGQITALLRSRWGLIKARENNNRHHALDAIVVACATPSMQQKITRFIRFKEVHPYKIENRYEMVDQESGEIISPHFPEPWAYFRQEVNIRVFDNHPDTVLKEMLPDRPQANHQFVQPLFVSRAPTRKMSGQGHMETIKSAKRLAEGISVLRIPLTQLKPNLLENMVNKEREPALYAGLKARLAEFNQDPAKAFATPFYKQGGQQVKAIRVEQVQKSGVLVRENNGVADNASIVRTDVFIKNNKFFLVPIYTWQVAKGILPNKAIVAHKNEDEWEEMDEGAKFKFSLFPNDLVELKTKKEYFFGYYIGLDRATGNISLKEHDGEISKGKDGVYRVGVKLALSFEKYQVDELGKNRQICRPQQRQPVR

SEQ ID NO: 8 - protein, 1368 aa, Streptococcus pyogenes
MDKKYSIGLDIGTNSVGWAVITDDYKVPSKKLKGLGNTDRHGIKKNLIGALLFDSGETAEATRLKRTARRRYTRRKNRICYLQEIFSNEMAKVDDSFFHRLEESFLVEEDKKHERHPIFGNIVDEVAYHEKYPTIYHLRKKLADSTDKVDLRLIYLALAHMIKFRGHFLIEGDLNPDNSDVDKLFIQLVQTYNQLFEENPINASRVDAKAILSARLSKSRRLENLIAQLPGEKKNGLFGNLIALSLGLTPNFKSNFDLAEDAKLQLSKDTYDDDLDNLLAQIGDQYADLFLAAKNLSDATLLSDILRVNSEITKAPLSASMIKRYDEHHQDLTLLKALVRQQLPEKYKEIFFDQSKNGYAGYIDGGASQEEFYKFIKPILEKMDGTEELLAKLNREDLLRKQRTFDNGSIPYQIHLGELHAILRRQEDFYPFLKDNREKIEKILTFRIPYYVGPLARGNSRFAWMTRKSEETITPWNFEEVVDKGASAQSFIERMTNFDKNLPNEKVLPKHSLLYEYFTVYNELTKVKYVTEGMRKPAFLSGEQKKAIVDLLFKTNRKVTVKQLKEDYFKKIECFDSVEISGVEDRFNASLGTYHDLLKIIKDKDFLDNEENEDILEDIVLTLTLFEDREMIEERLKTYAHLFDDKVMKQLKRRRYTGWGRLSRKLINGIRDKQSGKTILDFLKSDGFANRNFMQLIHDDSLTFKEDIQKAQVSGQGDSLHEHIANLAGSPAIKKGILQTVKVVDELVKVMGRHKPENIVIEMARENQTTQKGQKNSRERMKRIEEGIKELGSDILKEYPVENTQLQNEKLYLYYLQNGRDMYVDQELDINRLSDYDVDHIVPQSFLKDDSIDNKVLTRSDKNRGKSDNVPSEEVVKKMKNYWRQLLNAKLITQRKFDNLTKAERGGLSELDKVGFIKRQLVETRQITKHVAQILDSRMNTKYDENDKLIREVRVITLKSKLVSDFRKDFQFYKVREINNYHHAHDAYLNAVVGTALIKKYPKLESEFVYGDYKVYDVRKMIAKSEQEIGKATAKYFFYSNIMNFFKTEITLANGEIRKRPLIETNGETGEIVWDKGRDFATVRKVLSMPQVNIVKKTEVQTGGFSKESILPKRNSDKLIARKKDWDPKKYGGFDSPTVAYSVLVVAKVEKGKSKKLKSVKELLGITIMERSSFEKDPIDFLEAKGYKEVRKDLIIKLPKYSLFELENGRKRMLASAGELQKGNELALPSKYVNFLYLASHYEKLKGSPEDNEQKQLFVEQHKHYLDEIIEQISEFSKRVILADANLDKVLSAYNKHRDKPIREQAENIIHLFTLTNLGAPAAFKYFDTTIDRKRYTSTKEVLDATLIHQSITGLYETRIDLSQLGGD

SEQ ID NO: 9 - protein, 1334 aa, Listeria innocua
MKKPYTIGLDIGTNSVGWAVLTDQYDLVKRKMKIAGDSEKKQIKKNFWGVRLFDEGQTAADRRMARTARRRIERRRNRISYLQGIFAEEMSKTDANFFCRLSDSFYVDNEKRNSRHPFFATIEEEVEYHKNYPTIYHLREELVNSSEKADLRLVYLALAHIIKYRGNFLIEGALDTQNTSVDGIYKQFIQTYNQVFASGIEDGSLKKLEDNKDVAKILVEKVTRKEKLERILKLYPGEKSAGMFAQFISLIVGSKGNFQKPFDLIEKSDIECAKDSYEEDLESLLALIGDEYAELFVAAKNAYSAVVLSSIITVAETETNAKLSASMIERFDTHEEDLGELKAFIKLHLPKHYEEIFSNTEKHGYAGYIDGKTKQADFYKYMKMTLENIEGADYFIAKIEKENFLRKQRTFDNGAIPHQLHLEELEAILHQQAKYYPFLKENYDKIKSLVTFRIPYFVGPLANGQSEFAWLTRKADGEIRPWNIEEKVDFGKSAVDFIEKMTNKDTYLPKENVLPKHSLCYQKYLVYNELTKVRYINDQGKTSYFSGQEKEQIFNDLFKQKRKVKKKDLELFLRNMSHVESPTIEGLEDSFNSSYSTYHDLLKVGIKQEILDNPVNTEMLENIVKILTVFEDKRMIKEQLQQFSDVLDGVVLKKLERRHYTGWGRLSAKLLMGIRDKQSHLTILDYLMNDDGLNRNLMQLINDSNLSFKSIIEKEQVTTADKDIQSIVADLAGSPAIKKGILQSLKIVDELVSVMGYPPQTIVVEMARENQTTGKGKNNSRPRYKSLEKAIKEFGSQILKEHPTDNQELRNNRLYLYYLQNGKDMYTGQDLDIHNLSNYDIDHIVPQSFITDNSIDNLVLTSSAGNREKGDDVPPLEIVRKRKVFWEKLYQGNLMSKRKFDYLTKAERGGLTEADKARFIHRQLVETRQITKNVANILHQRFNYEKDDHGNTMKQVRIVTLKSALVSQFRKQFQLYKVRDVNDYHHAHDAYLNGVVANTLLKVYPQLEPEFVYGDYHQFDWFKANKATAKKQFYTNIMLFFAQKDRIIDENGEILWDKKYLDTVKKVMSYRQMNIVKKTEIQKGEFSKATIKPKGNSSKLIPRKTNWDPMKYGGLDSPNMAYAVVIEYAKGKNKLVFEKKIIRVTIMERKAFEKDEKAFLEEQGYRQPKVLAKLPKYTLYECEEGRRRMLASANEAQKGNQQVLPNHLVTLLHHAANCEVSDGKSLDYIESNREMFAELLAHVSEFAKRYTLAEANLNKINQLFEQNKEGDIKAIAQSFVDLMAFNAMGAPASFKFFETTIERKRYNNLKELLNSTIIYQSITGLYESRKRLDD

SEQ ID NO: 10 - protein, 1368 aa, Streptococcus pyogenes; identical to SEQ ID NO: 8

SEQ ID NO: 11 - protein, 1370 aa, Streptococcus agalactiae
MNKPYSIGLDIGTNSVGWSIITDDYKVPAKKMRVLGNTDKEYIKKNLIGALLFDGGNTAADRRLKRTARRRYTRRRNRILYLQEIFAEEMSKVDDSFFHRLEDSFLVEEDKRGSKYPIFATLQEEKDYHEKFSTIYHLRKELADKKEKADLRLIYIALAHIIKFRGHFLIEDDSFDVRNTDISKQYQDFLEIFNTTFENNDLLSQNVDVEAILTDKISKSAKKDRILAQYPNQKSTGIFAEFLKLIVGNQADFKKYFNLEDKTPLQFAKDSYDEDLENLLGQIGDEFADLFSAAKKLYDSVLLSGILTVIDLSTKAPLSASMIQRYDEHREDLKQLKQFVKASLPEKYQEIFADSSKDGYAGYIEGKTNQEAFYKYLSKLLTKQEDSENFLEKIKNEDFLRKQRTFDNGSIPHQVHLTELKAIIRRQSEYYPFLKENQDRIEKILTFRIPYYIGPLAREKSDFAWMTRKTDDSIRPWNFEDLVDKEKSAEAFIHRMTNNDFYLPEEKVLPKHSLIYEKFTVYNELTKVRYKNEQGETYFFDSNIKQEIFDGVFKEHRKVSKKKLLDFLAKEYEEFRIVDVIGLDKENKAFNASLGTYHDLEKILDKDFLDNPDNESILEDIVQTLTLFEDREMIKKRLENYKDLFTESQLKKLYRRHYTGWGRLSAKLINGIRDKESQKTILDYLIDDGRSNRNFMQLINDDGLSFKSIISKAQAGSHSDNLKEVVGELAGSPAIKKGILQSLKIVDELVKVMGYEPEQIVVEMARENQTTNQGRRNSRQRYKLLDDGVKNLASDLNGNILKEYPTDNQALQNERLFLYYLQNGRDMYTGEALDIDNLSQYDIDHIIPQAFIKDDSIDNRVLVSSAKNRGKSDDVPSLEIVKDCKVFWKKLLDAKLMSQRKYDNLTKAERGGLTSDDKARFIQRQLVETRQITKHVARILDERFNNELDSKGRRIRKVKIVTLKSNLVSNFRKEFGFYKIREVNNYHHAHDAYLNAVVAKAILTKYPQLEPEFVYGDYPKYNSYKTRKSATEKLFFYSNIMNFFKTKVTLADGTVVVKDDIEVNNDTGEIVWDKKKHFATVRKVLSYPQNNIVKKTEIQTGGFSKESILAHGNSDKLIPRKTKDIYLDPKKYGGFDSPIVAYSVLVVADIKKGKAQKLKTVTELLGITIMERSRFEKNPSAFLESKGYLNIRADKLIILPKYSLFELENGRRRLLASAGELQKGNELALPTQFMKFLYLASRYNESKGKPEEIEKKQEFVNQHVSYFDDILQLINDFSKRVILADANLEKINKLYQDNKENISVDELANNIINLFTFTSLGAPAAFKFFDKIVDRKRYTSTKEVLNSTLIHQSITGLYETRIDLGKLGED

SEQ ID NO: 12 - protein, 1345 aa, Streptococcus mutans
MKKPYSIGLDIGTNSVGWAVVTDDYKVPAKKMKVLGNTDKSHIEKNLLGALLFDSGNTAEDRRLKRTARRRYTRRRNRILYLQEIFSEEMGKVDDSFFHRLEDSFLVTEDKRGERHPIFGNLEEEVKYHENFPTIYHLRQYLADNPEKVDLRLVYLALAHIIKFRGHFLIEGKFDTRNNDVQRLFQEFLAVYDNTFENSSLQEQNVQVEEILTDKISKSAKKDRVLKLFPNEKSNGRFAEFLKLIVGNQADFKKHFELEEKAPLQFSKDTYEEELEVLLAQIGDNYAELFLSAKKLYDSILLSGILTVTDVGTKAPLSASMIQRYNEHQMDLAQLKQFIRQKLSDKYNEVFSDVSKDGYAGYIDGKTNQEAFYKYLKGLLNKIEGSGYFLDKIEREDFLRKQRTFDNGSIPHQIHLQEMRAIIRRQAEFYPFLADNQDRIEKLLTFRIPYYVGPLARGKSDFAWLSRKSADKITPWNFDEIVDKESSAEAFINRMTNYDLYLPNQKVLPKHSLLYEKFTVYNELTKVKYKTEQGKTAFFDANMKQEIFDGVFKVYRKVTKDKLMDFLEKEFDEFRIVDLTGLDKENKVFNASYGTYHDLCKILDKDFLDNSKNEKILEDIVLTLTLFEDREMIRKRLENYSDLLTKEQVKKLERRHYTGWGRLSAELIHGIRNKESRKTILDYLIDDGNSNRNFMQLINDDALSFKEEIAKAQVIGETDNLNQVVSDIAGSPAIKKGILQSLKIVDELVKIMGHQPENIVVEMARENQFTNQGRRNSQQRLKGLTDSIKEFGSQILKEHPVENSQLQNDRLFLYYLQNGRDMYTGEELDIDYLSQYDIDHIIPQAFIKDNSIDNRVLTSSKENRGKSDDVPSKDVVRKMKSYWSKLLSAKLITQRKFDNLTKAERGGLTDDDKAGFIKRQLVETRQITKHVARILDERFNTETDENNKKIRQVKIVTLKSNLVSNFRKEFELYKVREINDYHHAHDAYLNAVIGKALLGVYPQLEPEFVYGDYPHFHGHKENKATAKKFFYSNIMNFFKKDDVRTDKNGEIIWKKDEHISNIKKVLSYPQVNIVKKVEEQTGGFSKESILPKGNSDKLIPRKTKKFYWDTKKYGGFDSPIVAYSILVIADIEKGKSKKLKTVKALVGVTIMEKMTFERDPVAFLERKGYRNVQEENIIKLPKYSLFKLENGRKRLLASARELQKGNEIVLPNHLGTLLYHAKNIHKVDEPKHLDYVDKHKDEFKELLDVVSNFSKKYTLAEGNLEKIKELYAQNNGEDLKELASSFINLLTFTAIGAPATFKFFDKNIDRKRYTSTTEILNATLIHQSITGLYETRIDLNKLGGD

SEQ ID NO: 13 - protein, 1377 aa, Streptococcus agalactiae
MNKPYSIGLDIGTNSVGWSIITDDYKVPAKKMRVLGNTDKEYIKKNLIGALLFDGGNTAADRRLKRTARRRYTRRRNRILYLQEIFAEEMSKVDDSFFHRLEDSFLVEEDKRGSKYPIFATMQEEKYYHEKFPTIYHLRKELADKKEKADLRLVYLALAHIIKFRGHFLIEDDRFDVRNTDIQKQYQAFLEIFDTTFENNHLLSQNVDVEAILTDKISKSAKKDRILAQYPNQKSTGIFAEFLKLIVGNQADFKKHFNLEDKTPLQFAKDSYDEDLENLLGQIGDEFADLFSVAKKLYDSVLLSGILTVTDLSTKAPLSASMIQRYDEHHEDLKHLKQFVKASLPENYREVFADSSKDGYAGYIEGKTNQEAFYKYLLKLLTKQEGSEYFLEKIKNEDFLRKQRTFDNGSIPHQVHLTELRAIIRRQSEYYPFLKENQDRIEKILTFRIPYYVGPLAREKSDFAWMTRKTDDSIRPWNFEDLVDKEKSAEAFIHRMTNNDLYLPEEKVLPKHSLIYEKFTVYNELTKVRFLAEGFKDFQFLNRKQKETIFNSLFKEKRKVTEKDIISFLNKVDGYEGIAIKGIEKQFNASLSTYHDLKKILGKDFLDNTDNELILEDIVQTLTLFEDREMIKKCLDIYKDFFTESQLKKLYRRHYTGWGRLSAKLINGIRNKENQKTILDYLIDDGSANRNFMQLINDDDLSFKPIIDKARTGSHSDNLKEVVGELAGSPAIKKGILQSLKIVDELVKVMGYEPEQIVVEMARENQTTAKGLSRSRQRLTTLRESLANLKSNILEEKKPKYVKDQVENHHLSDDRLFLYYLQNGRDMYTKKALDIDNLSQYDIDHIIPQAFIKDDSIDNRVLVSSAKNRGKSDDVPSIEIVKARKMFWKNLLDAKLMSQRKYDNLTKAERGGLTSDDKARFIQRQLVETRQITKHVARILDERFNNEVDNGKKICKVKIVTLKSNLVSNFRKEFGFYKIREVNDYHHAHDAYLNAVVAKAILTKYPQLEPEFVYGMYRQKKLSKIVHEDKEEKYSEATRKMFFYSNLMNMFKRVVRLADGSIVVRPVIETGRYMRKTAWDKKKHFATVRKVLSYPQNNIVKKTEIQTGGFSKESILAHGNSDKLIPRKTKDIYLDPKKYGGFDSPIVAYSVLVVADIKKGKAQKLKTVTELLGITIMERSRFEKNPSAFLESKGYLNIRDDKLMILPKYSLFELENGRRRLLASAGELQKGNELALPTQFMKFLYLASRYNESKGKPEEIEKKQEFVNQHVSYFDDILQLINDFSKRVILADANLEKINKLYQDNKENIPVDELANNIINLFTFTSLGAPAAFKFFDKIVDRKRYTSTKEVLNSTLIHQSITGLYETRIDLGKLGED

SEQ ID NO: 14 - protein, 131 aa, Helicobacter hepaticus
MRILGFDIGITSIGWAYVESNELKDCGVRIFTKAENPKNGDSLAAPRREARGARRRLARRKARLNAIKRLLCKEFELNLNDYLANDGELPKAYQTSKDTKSPYELYTAFHWIIFAFCSIASSLSNRQMLPI

SEQ ID NO: 15 - protein, 1059 aa, Wolinella succinogenes
MIERILGVDLGISSLGWAIVEYDKDDEAANRIIDCGVRLFTAAETPKKKESPNKARREARGIRRVLNRRRVRMNMIKKLFLRAGLIQDVDLDGEGGMFYSKANRADVWELRHDGLYRLLKGDELARVLIHIAKHRGYKFIGDDEADEESGKVKKAGVVLRQNFEAAGCRTVGEWLWRERGANGKKRNKHGDYEISIHRDLLVEEVEAIFVAQQEMRSTIATDALKAAYREIAFFVRPMQRIEKMVGHCTYFPEERRAPKSAPTAEKFIAISKFFSTVIIDNEGWEQKIIERKTLEELLDFAVSREKVEFRHLRKFLDLSDNEIFKGLHYKGKPKTAKKREATLFDPNEPTELEFDKVEAEKKAWISLRGAAKLREALGNEFYGRFVALGKHADEATKILTYYKDEGQKRRELTKLPLEAEMVERLVKIGFSDFLKLSLKAIRDILPAMESGARYDEAVLMLGVPHKEKSAILPPLNKTDIDILNPTVIRAFAQFRKVANALVRKYGAFDRVHFELAREINTKGEIEDIKESQRKNEKERKEAADWIAETSFQVPLTRKNILKKRLYIQQDGRCAYTGDVIELERLFDEGYCEIDHILPRSRSADDSFANKVLCLARANQQKTDRTPYEWFGHDAARWNAFETRTSAPSNRVRTGKGKIDRLLKKNFDENSEMAFKDRNLNDTRYMARAIKTYCEQYWVFKNSHTKAPVQVRSGKLTSVLRYQWGLESKDRESHTHHAVDAIIIAFSTQGMVQKLSEYYRFKETHREKERPKLAVPLANFRDAVEEATRIENTETVKEGVEVKRLLISRPPRARVTGQAHEQTAKPYPRIKQVKNKKKWRLAPIDEEKFESFKADRVASANQKNFYETSTIPRVDVYHKKGKFHLVPIYLHEMVLNELPNLSLGTNPEAMDENFFKFSIFKDDLISIQTQGTPKKPAKIIMGYFKNMHGANMVLSSINNSPCEGFTCTPVSMDKKHKDKCKLCPEENRIAGRCLQGFLDYWSQEGLRPPRKEFECDQGVKFALDVKKYQIDPLGYYYEVKQEKRLGTIPQMRSAKKLVKK

SEQ ID NO: 16 - protein, 1409 aa, Wolinella succinogenes
MLVSPISVDLGGKNTGFFSFTDSLDNSQSGTVIYDESFVLSQVGRRSKRHSKRNNLRNKLVKRLFLLILQEHHGLSIDVLPDEIRGLFNKRGYTYAGFELDEKKKDALESDTLKEFLSEKLQSIDRDSDVEDFLNQIASNAESFKDYKKGFEAVFASATHSPNKKLELKDELKSEYGENAKELLAGLRVTKEILDEFDKQENQGNLPRAKYFEELGEYIATNEKVKSFFDSNSLKLTDMTKLIGNISNYQLKELRRYFNDKEMEKGDIWIPNKLHKITERFVRSWHPKNDADRQRRAELMKDLKSKEIMELLTTTEPVMTIPPYDDMNNRGAVKCQTLRLNEEYLDKHLPNWRDIAKRLNHGKFNDDLADSTVKGYSEDSTLLHRLLDTSKEIDIYELRGKKPNELLVKTLGQSDANRLYGFAQNYYELIRQKVRAGIWVPVKNKDDSLNLEDNSNMLKRCNHNPPHKKNQIHNLVAGILGVKLDEAKFAEFEKELWSAKVGNKKLSAYCKNIEELRKTHGNTFKIDIEELRKKDPAELSKEEKAKLRLTDDVILNEWSQKIANFFDIDDKHRQRFNNLFSMAQLHTVIDTPRSGFSSTCKRCTAENRFRSETAFYNDETGEFHKKATATCQRLPADTQRPFSGKIERYIDKLGYELAKIKAKELEGMEAKEIKVPIILEQNAFEYEESLRKSKTGSNDRVINSKKDRDGKKLAKAKENAEDRLKDKDKRIKAFSSGICPYCGDTIGDDGEIDHILPRSHTLKIYGTVFNPEGNLIYVHQKCNQAKADSIYKLSDIKAGVSAQWIEEQVANIKGYKTFSVLSAEQQKAFRYALFLQNDNEAYKKVVDWLRTDQSARVNGTQKYLAKKIQEKLTKMLPNKHLSFEFILADATEVSELRRQYARQNPLLAKAEKQAPSSHAIDAVMAFVARYQKVFKDGTPPNADEVAKLAMLDSWNPASNEPLTKGLSTNQKIEKMIKSGDYGQKNMREVFGKSIFGENAIGERYKPIVVQEGGYYIGYPATVKKGYELKNCKVVTSKNDIAKLEKIIKNQDLISLKENQYIKIFSINKQTISELSNRYFNMNYKNLVERDKEIVGLLEFIVENCRYYTKKVDVKFAPKYIHETKYPFYDDWRRFDEAWRYLQENQNKTSSKDRFVIDKSSLNEYYQPDKNEYKLDVDTQPIWDDFCRWYFLDRYKTANDKKSIRIKARKTFSLLAESGVQGKVFRAKRKIPTGYAYQALPMDNNVIAGDYANILLEANSKTLSLVPKSGISIEKQLDKKLDVIKKTDVRGLAIDNNSFFNADFDTHGIRLIVENTSVKVGNFPISAIDKSAKRMIFRALFEKEKGKRKKKTTISFKESGPVQDYLKVFLKKIVKIQLRTDGSISNIVVRKNAADFTLSFRSEHIQKLLK

SEQ ID NO: 17 - protein, 1374 aa, Fusobacterium nucleatum
MKKQKFSDYYLGFDIGTNSVGWCVTDLDYNVLRFNKKDMWGSRLFDEAKTAAERRVQRNSRRRLKRRKWRLNLLEEIFSDEIMKIDSNFFRRLKESSLWLEDKNSKEKFTLFNDDNYKDYDFYKQYPTIFHLRDELIKNPEKKDIRLIYLALHSIFKSRGHFLFEGQNLKEIKNFETLYNNLISFLEDNGINKSIDKDNIEKLEKIICDSGKGLKDKEKEFKGIFNSDKQLVAIFKLSVGSSVSLNDLFDTDEYKKEEVEKEKISFREQIYEDDKPIYYSILGEKIELLDIAKSFYDFMVLNNILSDSNYISEAKVKLYEEHKKDLKNLKYIIRKYNKENYDKLFKDKNENNYPAYIGLNKEKDKKEVVEKSRLKIDDLIKVIKGYLPKPERIEEKDKTIFNEILNKIELKTILPKQRISDNGTLPYQIHEVELEKILENQSKYYDFLNYEENGVSTKDKLLKTFKFRIPYYVGPLNSYHKDKGGNSWIVRKEEGKILPWNFEQKVDIEKSAEEFIKRMTNKCTYLNGEDVIPKDSFLYSEYIILNELNKVQVNDEFLNEENKRKIIDELFKENKKVSEKKFKEYLLVNQIANRTVELKGIKDSFNSNYVSYIKFKDIFGEKLNLDIYKEISEKSILWKCLYGDDKKIFEKKIKNEYGDILNKDEIKKINSFKFNTWGRLSEKLLTGIEFINLETGECYSSVMEALRRTNYNLMELLSSKFTLQESIDNENKEMNEVSYRDLIEESYVSPSLKRAILQTLKIYEEIKKITGRVPKKVFIEMARGGDESMKNKKIPARQEQLKKLYDSCGNDIANFSIDIKEMKNSLSSYDNNSLRQKKLYLYYLQFGKCMYTGREIDLDRLLQNNDTYDIDHIYPRSKVIKDDSFDNLVLVLKNENAEKSNEYPVKKEIQEKMKSFWRFLKEKNFISDEKYKRLTGKDDFELRGFMARQLVNVRQTTKEVGKILQQIEPEIKIVYSKAEIASSFREMFDFIKVRELNDTHHAKDAYLNIVAGNVYNTKFTEKPYRYLQEIKENYDVKKIYNYDIKNAWDKENSLEIVKKNMEKNTVNITRFIKEEKGELFNLNPIKKGETSNEIISIKPKLYDGKDNKLNEKYGYYTSLKAAYFIYVEHEKKNKKVKTFERITRIDSTLIKNEKNLIKYLVSQKKLLNPKIIKKIYKEQTLIIDSYPYTFTGVDSNKKVELKNKKQLYLEKKYEQILKNALKFVEDNQGETEENYKFIYLKKRNNNEKNETIDAVKERYNIEFNEMYDKFLEKLSSKDYKNYINNKLYTNFLNSKEKFKKLKLWEKSLILREFLKIFNKNTYGKYEIKDSQTKEKLFSFPEDTGRIRLGQSSLGNNKELLEESVTGLFVKKIKL

SEQ ID NO: 18 - protein, 1084 aa, Corynebacterium diphtheriae
MKYHVGIDVGTFSVGLAAIEVDDAGMPIKTLSLVSHIHDSGLDPDEIKSAVTRLASSGIARRTRRLYRRKRRRLQQLDKFIQRQGWPVIELEDYSDPLYPWKVRAELAASYIADEKERGEKLSVALRHIARHRGWRNPYAKVSSLYLPDGPSDAFKAIREEIKRASGQPVPETATVGQMVTLCELGTLKLRGEGGVLSARLQQSDYAREIQEICRMQEIGQELYRKIIDVVFAAESPKGSASSRVGKDPLQPGKNRALKASDAFQRYRIAALIGNLRVRVDGEKRILSVEEKNLVFDHLVNLTPKKEPEWVTIAEILGIDRGQLIGTATMTDDGERAGARPPTHDTNRSIVNSRIAPLVDWWKTASALEQHAMVKALSNAEVDDFDSPEGAKVQAFFADLDDDVHAKLDSLHLPVGRAAYSEDTLVRLTRRMLSDGVDLYTARLQEFGIEPSWTPPTPRIGEPVGNPAVDRVLKTVSRWLESATKTWGAPERVIIEHVREGFVTEKRAREMDGDMRRRAARNAKLFQEMQEKLNVQGKPSRADLWRYQSVQRQNCQCAYCGSPITFSNSEMDHIVPRAGQGSTNTRENLVAVCHRCNQSKGNTPFAIWAKNTSIEGVSVKEAVERTRHWVTDTGMRSTDFKKFTKAVVERFQRATMDEEIDARSMESVAWMANELRSRVAQHFASHGTTVRVYRGSLTAEARRASGISGKLKFFDGVGKSRLDRRHHAIDAAVIAFTSDYVAETLAVRSNLKQSQAHRQEAPQWREFTGKDAEHRAAWRVWCQKMEKLSALLTEDLRDDRVVVMSNVRLRLGNGSAHKETIGKLSKVKLSSQLSVSDIDKASSEALWCALTREPGFDPKEGLPANPERHIRVNGTHVYAGDNIGLFPVSAGSIALRGGYAELGSSFHHARVYKITSGKKPAFAMLRVYTIDLLPYRNQDLFSVELKPQTMSMRQAEKKLRDALATGNAEYLGWLVVDDELVVDTSKIATDQVKAVEAELGTIRRWRVDGFFSPSKLRLRPLQMSKEGIKKESAPELSKIIDRPGWLPAVNKLFSDGNVTVVRRDSLGRVRLESTAHLPVTWKVQ

SEQ ID NO: 19 - protein, 1395 aa, Treponema denticola
MKKEIKDYFLGLDVGTGSVGWAVTDTDYKLLKANRKDLWGMRCFETAETAEVRRLHRGARRRIERRKKRIKLLQELFSQEIAKTDEGFFQRMKESPFYAEDKTILQENTLFNDKDFADKTYHKAYPTINHLIKAWIENKVKPDPRLLYLACHNIIKKRGHFLFEGDFDSENQFDTSIQALFEYLREDMEVDIDADSQKVKEILKDSSLKNSEKQSRLNKILGLKPSDKQKKAITNLISGNKINFADLYDNPDLKDAEKNSISFSKDDFDALSDDLASILGDSFELLLKAKAVYNCSVLSKVIGDEQYLSFAKVKIYEKHKTDLTKLKNVIKKHFPKDYKKVFGYNKNEKNNNNYSGYVGVCKTKSKKLIINNSVNQEDFYKFLKTILSAKSEIKEVNDILTEIETGTFLPKQISKSNAEIPYQLRKMELEKILSNAEKHFSFLKQKDEKGLSHSEKIIMLLTFKIPYYIGPINDNHKKFFPDRCWVVKKEKSPSGKTTPWNFFDHIDKEKTAEAFITSRTNFCTYLVGESVLPKSSLLYSEYTVLNEINNLQIIIDGKNICDIKLKQKIYEDLFKKYKKITQKQISTFIKHEGICNKTDEVIILGIDKECTSSLKSYIELKNIFGKQVDEISTKNMLEEIIRWATIYDEGEGKTILKTKIKAEYGKYCSDEQIKKILNLKFSGWGRLSRKFLETVTSEMPGFSEPVNIITAMRETQNNLMELLSSEFTFTENIKKINSGFEDAEKQFSYDGLVKPLFLSPSVKKMLWQTLKLVKEISHITQAPPKKIFIEMAKGAELEPARTKTRLKILQDLYNNCKNDADAFSSEIKDLSGKIENEDNLRLRSDKLYLYYTQLGKCMYCGKPIEIGHVFDTSNYDIDHIYPQSKIKDDSISNRVLVCSSCNKNKEDKYPLKSEIQSKQRGFWNFLQRNNFISLEKLNRLTRATPISDDETAKFIARQLVETRQATKVAAKVLEKMFPETKIVYSKAETVSMFRNKFDIVKCREINDFHHAHDAYLNIVVGNVYNTKFTNNPWNFIKEKRDNPKIADTYNYYKVFDYDVKRNNITAWEKGKTIITVKDMLKRNTPIYTRQAACKKGELFNQTIMKKGLGQHPLKKEGPFSNISKYGGYNKVSAAYYTLIEYEEKGNKIRSLETIPLYLVKDIQKDQDVLKSYLTDLLGKKEFKILVPKIKINSLLKINGFPCHITGKTNDSFLLRPAVQFCCSNNEVLYFKKIIRFSEIRSQREKIGKTISPYEDLSFRSYIKENLWKKTKNDEIGEKEFYDLLQKKNLEIYDMLLTKHKDTIYKKRPNSATIDILVKGKEKFKSLIIENQFEVILEILKLFSATRNVSDLQHIGGSKYSGVAKIGNKISSLDNCILIYQSITGIFEKRIDLLKV

SEQ ID NO: 20 - protein, 1334 aa, Listeria monocytogenes
MKNPYTIGLDIGTNSVGWAVLTNQYDLVKRKMKVAGNSDKKQIKKNFWGVRLFDDGQTAVDRRMNRTARRRIERRRNRISYLQEIFAVEMANIDANFFCRLNDSFYVDSEKRNSRHPFFATIEEEVAYHDNYRTIYHLREKLVNSSEKADLRLVYLALAHIIKYRGNFLIEGALDTKNTSVDEVYKQFIETYNQVFMSNIEEGALAKVEENIEVANILAGKFTRREKFERILQLYPGEKSTGMFAQFISLIVGSKGNFQKVFDLIEKTDIECAKDSYEEDLETLLAIIGDEYAELFVAAKNTYNAVVLSSIITVTDTETNAKLSASMIERFDAHEKDLVELKAFIKLNLPKQYEEIFSNAAIDGYAGYIDGKTKQVDFYKYLKTILENIEGSDYFIAKIEEENFLRKQRTFDNGAIPHQLHLEELEAIIHQQAKYYPFLKEDYDKIKSLVTFRIPYFVGPLANGQSEFAWLTRKADGEIRPWNIEEKVDFGKSAVDFIEKMTNKDTYLPKENVLPKHSLCYQKYMVYNELTKIRYIDDQGKTNYFSGREKQQVFNDLFKQKRKVKKKDLELFLRNINHIESPTIEGLEDSFNASYATYHDLLKVGMKQEILDNPLNTEMLEDIVKILTVFEDKPMIKEQLQQFSDVLDGGVLKKLERRHYTGWGRLSAKLLVGIREKQSHLTILDYLMNDDGLNRNLMQLINDSNLSFKSIIEKEQVSTTDKDLQSIVAELAGSPAIKKGILQSLKIVDELVSIMGYPPQTIVVEMARENQTTGKGKNNSKPRYKSLEKAIKEFGSQILKEHPTDNQELKNNRLYLYYLQNGKDMYTGQELDIHNLSNYDIDHIVPQSFITDNSIDNLVLTSSAGNREKGGDVPPLEIVRKRKVFWEKLYQGNLMSKRKFDYLTKAERGGLTEADKARFIHRQLVETRQITKNVANILYQRFNKETDNHGNTMEQVRIVTLKSALVSQFRKQFQLYKVREVNGYHHAHDAYLNGVVANTLLKVYPQLEPEFVYGEYHQFDWFKANKATAKKQFYTNIMLFFAQKERIIDENGEILWDKKYLETIKKVLDYRQMNIVKKTEIQKGEFSKATIKPKGNSSKLIPRKENWDPMKYGGLDSPNMAYAVIIEHAKGKKKIVIEKKLIQINIMERKMFEKDEEAFLEEKGYRHPKVLTKLPKYTLYECEKGRRRMLASANEAQKGNQLVLSNHLVSLLYHAKNCEASDGKSLKYIEAHRETFSELLAQVSEFATRYTLADANLSKINNLFEQNKEGDIKAIAQSFVDLMAFNAMGAPASFKFFEATIDRKRYTNLKELLSSTIIYQSITGLYESRKRLDD

SEQ ID NO: 21 - protein, 1236 aa, Mycoplasma mobile
MYFYKNKENKLNKKVVLGLDLGIASVGWCLTDISQKEDNKFPIILHGVRLFETVDDSDDKLLNETRRKKRGQRRRNRRLFTRKRDFIKYLIDNNIIELEFDKNPKILVRNFIEKYINPFSKNLELKYKSVTNLPIGFHNLRKAAINEKYKLDKSELIVLLYFYLSLRGAFFDNPEDTKSKEMNKNEIEIFDKNESIKNAEFPIDKIIEFYKISGKIRSTINLKFGHQDYLKEIKQVFEKQNIDFMNYEKFAMEEKSFFSRIRNYSEGPGNEKSFSKYGLYANENGNPELIINEKGQKIYTKIFKTLWESKIGKCSYDKKLYRAPKNSFSAKVFDITNKLTDWKHKNEYISERLKRKILLSRFLNKDSKSAVEKILKEENIKFENLSEIAYNKDDNKINLPIINAYHSLTTIFKKHLINFENYLISNENDLSKLMSFYKQQSEKLFVPNEKGSYEINQNNNVLHIFDAISNILNKFSTIQDRIRILEGYFEFSNLKKDVKSSEIYSEIAKLREFSGTSSLSFGAYYKFIPNLISEGSKNYSTISYEEKALQNQKNNFSHSNLFEKTWVEDLIASPTVKRSLRQTMNLLKEIFKYSEKNNLEIEKIVVEVTRSSNNKHERKKIEGINKYRKEKYEELKKVYDLPNENTTLLKKLWLLRQQQGYDAYSLRKIEANDVINKPWNYDIDHIVPRSISFDDSFSNLVIVNKLDNAKKSNDLSAKQFIEKIYGIEKLKEAKENWGNWYLRNANGKAFNDKGKFIKLYTIDNLDEFDNSDFINRNLSDTSYITNALVNHLTFSNSKYKYSVVSVNGKQTSNLRNQIAFVGIKNNKETEREWKRPEGFKSINSNDFLIREEGKNDVKDDVLIKDRSFNGHHAEDAYFITIISQYFRSFKRIERLNVNYRKETRELDDLEKNNIKFKEKASFDNFLLINALDELNEKLNQMRFSRMVITKKNTQLFNETLYSGKYDKGKNTIKKVEKLNLLDNRTDKIKKIEEFFDEDKLKENELTKLHIFNHDKNLYETLKIIWNEVKIEIKNKNLNEKNYFKYFVNKKLQEGKISFNEWVPILDNDFKIIRKIRYIKFSSEEKETDEIIFSQSNFLKIDQRQNFSFHNTLYWVQIWVYKNQKDQYCFISIDARNSKFEKDEIKINYEKLKTQKEKLQIINEEPILKINKGDLFENEEKELFYIVGRDEKPQKLEIKYILGKKIKDQKQIQKPVKKYFPNWKKVNLTYMGEIFKK

SEQ ID NO: 22 - protein, 1372 aa, Legionella pneumophila
MESSQILSPIGIDLGGKFTGVCLSHLEAFAELPNHANTKYSVILIDHNNFQLSQAQRRATRHRVRNKKRNQFVKRVALQLFQHILSRDLNAKEETALCHYLNNRGYTYVDTDLDEYIKDETTINLLKELLPSESEHNFIDWFLQKMQSSEFRKILVSKVEEKKDDKELKNAVKNIKNFITGFEKNSVEGHRHRKVYFENIKSDITKDNQLDSIKKKIPSVCLSNLLGHLSNLQWKNLHRYLAKNPKQFDEQTFGNEFLRMLKNFRHLKGSQESLAVRNLIQQLEQSQDYISILEKTPPEITIPPYEARTNTGMEKDQSLLLNPEKLNNLYPNWRNLIPGIIDAHPFLEKDLEHTKLRDRKRIISPSKQDEKRDSYILQRYLDLNKKIDKFKIKKQLSFLGQGKQLPANLIETQKEMETHFNSSLVSVLIQIASAYNKEREDAAQGIWFDNAFSLCELSNINPPRKQKILPLLVGAILSEDFINNKDKWAKFKIFWNTHKIGRTSLKSKCKEIEEARKNSGNAFKIDYEEALNHPEHSNNKALIKIIQTIPDIIQAIQSHLGHNDSQALIYHNPFSLSQLYTILETKRDGFHKNCVAVTCENYWRSQKTEIDPEISYASRLPADSVRPFDGVLARMMQRLAYEIAMAKWEQIKHIPDNSSLLIPIYLEQNRFEFEESFKKIKGSSSDKTLEQAIEKQNIQWEEKFQRIINASMNICPYKGASIGGQGEIDHIYPRSLSKKHFGVIFNSEVNLIYCSSQGNREKKEEHYLLEHLSPLYLKHQFGTDNVSDIKNFISQNVANIKKYISFHLLTPEQQKAARHALFLDYDDEAFKTITKFLMSQQKARVNGTQKFLGKQIMEFLSTLADSKQLQLEFSIKQITAEEVHDHRELLSKQEPKLVKSRQQSFPSHAIDATLTMSIGLKEFPQFSQELDNSWFINHLMPDEVHLNPVRSKEKYNKPNISSTPLFKDSLYAERFIPVWVKGETFAIGFSEKDLFEIKPSNKEKLFTLLKTYSTKNPGESLQELQAKSKAKWLYFPINKTLALEFLHHYFHKEIVTPDDTTVCHFINSLRYYTKKESITVKILKEPMPVLSVKFESSKKNVLGSFKHTIALPATKDWERLFNHPNFLALKANPAPNPKEFNEFIRKYFLSDNNPNSDIPNNGHNIKPQKHKAVRKVFSLPVIPGNAGTMMRIRRKDNKGQPLYQLQTIDDTPSMGIQINEDRLVKQEVLMDAYKTRNLSTIDGINNSEGQAYATFDNWLTLPVSTFKPEIIKLEMKPHSKTRRYIRITQSLADFIKTIDEALMIKPSDSIDDPLNMPNEIVCKNKLFGNELKPRDGKMKIVSTGKIVTYEFESDSTPQWIQTLYVTQLKKQP

SEQ ID NO: 23 - protein, 1122 aa, Streptococcus thermophilus
MSDLVLGLDIGIGSVGVGILNKVTGEIIHKNSRIFPAAQAENNLVRRTNRQGRRLTRRKKHRIVRLNRLFEESGLITDFTKISINLNPYQLRVKGLTDELSNEELFIALKNMVKHRGISYLDDASDDGNSSVGDYAQIVKENSKQLETKTPGQIQLERYQTYGQLRGDFTVEKDGKKHRLINVFPTSAYRSEALRILQTQQEFNSQITDEFINRYLEILTGKRKYYHGPGNEKSRTDYGRYRTNGETLDNIFGILIGKCTFYPDEFRAAKASYTAQEFNLLNDLNNLTVPTETKKLSKEQKNQIINYVKNEKVMGPAKLFKYIAKLLSCDVADIKGHRIDKSGKAEIHTFEAYRKMKTLETLDIEQMDRETLDKLAYVLTLNTEREGIQEALEHEFADGSFSQKQVDELVQFRKANSSIFGKGWHNFSVKLMMELIPELYETSEEQMTILTRLGKQKTTSSSNKTKYIDEKLLTEEIYNPVVAKSVRQAIKIVNAAIKEYGDFDNIVIEMARETNEDDEKKAIQKIQKANKDEKDAAMLKAANQYNGKAELPHSVFHGHKQLATKIRLWHQQGERCLYTGKTISIHDLINNPNQFEVDHILPLSITFDDSLANKVLVYATANQEKGQRTPYQALDSMDDAWSFRELKAFVRESKTLSNKKKEYLLTEEDISKFDVRKKFIERNLVDTRYASRVVLNALQEHFRAHKIDTKVSVVRGQFTSQLRRHWGIEKTRDTYHHHAVDALIIAASSQLNLWKKQKNTLVSYSEEQLLDIETGELISDDEYKESVFKAPYQHFVDTLKSKEFEDSILFSYQVDSKFNRKISDATIYATRQAKVGKDKKDETYVLGKIKDIYTQDGYDAFMKIYKKDKSKFLMYRHDPQTFEKVIEPILENYPNKEMNEKGKEVPCNPFLKYKEEHGYIRKYSKKGNGPEIKSLKYYDSKLLGNPIDITPENSKNKVVLQSLKPWRTDVYFNKNTGKYEILGLKYADLQFEKKTGTYKISQEKYNGIMKEEGVDSDSEFKFTLYKNDLLLVKDTETKEQQLFRFLSRTMPNVKYYVELKPYSKDKFEKNESLIEILGSADKSGRCIKGLGKSNISIYKVRTDVLGNQHIIKNEGDKPKLDF

SEQ ID NO: 24 - protein, 1128 aa, Streptococcus thermophilus
MSDLVLGLDIGIGSVGVGILNKVTGEIIHKNSRIFPAAQAENNLVRRTNRQGRRLTRRKKHRIVRLNRLFEESGLITDFTKISINLNPYQLRVKGLTDELSNEELFIALKNMVKHRGISYLDDASDDGNSSVGDYAQIVKENSKQLETKTPGQIQLERYQTYGQLRGDFTVEKDGKKHRLINVFPTSAYRSEALRILQTQQEFNPQITDEFINRYLEILTGKRKYYHGPGNEKSRTDYGRYRTSGETLDNIFGILIGKCTFYPEEFRAAKASYTAQEFNLLNDLNNLTVPTETKKLSKEQKNQIINYVKNEKAMGPAKLFKYIAKLLSCDVADIKGYRIDKSGKAEIHTFEAYRKMKTLETLDIEQMDRETLDKLAYVLTLNTEREGIQEALEHEFADGSFSQKQVDELVQFRKANSSIFGKGWHNFSVKLMMELIPELYETSEEQMTILTRLGKQKRLRLQIKQNISNKTKYIDEKLLTEEIYNPVVAKSVRQAIKIVNAAIKEYGDFDNIVIEMARETNEDDEKKAIQKIQKANKDEKDAAMLKAANQYNGKAELPHSVFHGHKQLATKIRLWHQQGERCLYTGKTISIHDLINNPNQFEVDHILPLSITFDDSLANKVLVYATANQEKGQRTPYQALDSMDDAWSFRELKAFVRESKTLSNKKKEYLLTEEDISKFDVRKKFIERNLVDTRYASRVVLNALQEHFRAHKIDTKVSVVRGQFTSQLRRHWGIEKTRDTYHHHAVDALIIAASSQLNLWKKQKNTLVSYSEEQLLDIETGELISDDEYKESVFKAPYQHFVDTLKSKEFEDSILFSYQVDSKFNRKISDATIYATRQAKVGKDKKDETYVLGKIKDIYTQDGYDAFMKIYKKDKSKFLMYRHDPQTFEKVIEPILENYPNKQMNEKGKEVPCNPFLKYKEEHGYIRKYSKKGNGPEIKSLKYYDSKLLGNPIDITPENSKNKVVLQSLKPWRTDVYFNKATGKYEILGLKYADLQFEKGTGTYKISQEKYNDIKKKEGVDSDSEFKFTLYKNDLLLVKDTETKEQQLFRFLSRTLPKQKHYVELKPYDKQKFEGGEALIKVLGNVANGGQCIKGLAKSNISIYKVRTDVLGNQHIIKNEGDKPKLDF

SEQ ID NO: 25 - protein, 1123 aa, Francisella tularensis
MNVKILPIAIDLDVKNTGVFSAFYQKGTSLEKLDNKNGKVYELSKDSYTLLMNNRTARRHKRRGIDRKQLVKRLFKLVWTEQLNLEWDKDTQQAISFLFNRRGFSFITDGYSTEYLNIVPEQVKAILMDIFDDYNGEDDLDSYLKLATEQESKISEIYNKLMQKILEFKLRKLCTDIKDDKVSTKTLKEITSYEFELLADYLANYSESLKTQKFSYTDKQGNLKELSYYHHDKYNIQEFLKRHATINDEILGTLLTDDFDIWNFNFEKFDFDKNEEKLQNQEDKDHTQAHLHHFVFVVNKIKSEMASGGRHRSQYFQEITNVLDENNHQEGYLKNFCENLHNKKYSNLSVKNLVNLVGNLSNLELKPLRKYFNDKIHAKADHWDEQKFTETYCHWILGEWRVGVKDQDKKDGAKYSYKDLCNELKQKVTKAGLIDFLLELDPCRTIPPYLDNNNRKPPKCQSLILNPKFLDNQYPNWQQYLQELKKLQSIQDYLDSFETDLKDLKSSKDQPYFVEYKSSNQQMASGQRDYKDLDARILQFIFDRVKASDELLLNEIYFQAKKLKQKASSELEKLESSKKLDEVIANSQLSQILKSQHTNGIFEQGTFLHLVCKYYKQRQRARDSRLYIMPEYRYDKKLDKYNNTGRFDDNNQLLTYCNHKPRQKRYQLLNDLAGVLQVSRNQLLSSVEEWFQQAQRVGEISKSQDEQIFEWLKSFKIASYCKAAVEMQKQYRGTLKNAIQTAIFRQSENINKNKNTGNQQQALSENSKDVKSLTADEKKLLKLIENIAKASQKIGESLGLNDKQIKKFNSIYSFAQIQQIAFAKRKGNANTCAVCSADNAHRMQQIKITELVEDNKDNIILSAKAQRLPAIPTRIVDGAVKKMATILAKNIVDDNWQNIKQVLSAKHQLHIPIITESNAFEFEPALADVKGKSLKDRRKKALERISPENIFKDKNNRIKEFAKGISAYSGANLTDGDFDGAKEELDHIIPRSHKKYGTLNDEANLICVTRDDNKNIFAIDTSKWFEIETPSDLRDIGVATIQYKIDNNSRPKVRVKLDYVIDDDSKINYFMNHSLLKSRYPDKVLEILKQSTIIEFESSGFNKTIKEMLGMTLAGIYNETSNN

SEQ ID NO: 26 - protein, 1436 aa, Bacteroides fragilis
MKRILGLDLGTNSIGWALVNEAENKDERSSIVKLGVRVNPLTVDELTNFEKGKSITTNADRTLKRGMRRNLQRYKLRRETLTEVLKEHKLITEDTILSENGNRTTFETYRLRAKAVTEEISLEEFARVLLMINKKRGYKSSRKAKGVEEGTLIDGMDIARELYNNNLTPGELCLQLLDAGKKFLPDFYRSDLQNELDRIWEKQKEYYPEILTDVLKEELRGKKRDAVWAICAKYFVWKENYTEWNKEKGKTEQQEREHKLEGIYSKRKRDEAKRENLQWRVNGLKEKLSLEQLVIVFQEMNTQINNSSGYLGAISDRSKELYFNKQTVGQYQMEMLDKNPNASLRNMVFYRQDYLDEFNMLWEKQAVYHKELTEELKKEIRDIIIFYQRRLKSQKGLIGFCEFESRQIEVDIDGKKKIKTVGNRVISRSSPLFQEFKIWQILNNIEVTVVGKKRKRRKLKENYSALFEELNDAEQLELNGSRRLCQEEKELLAQELFIRDKMTKSEVLKLLFDNPQELDLNFKTIDGNKTGYALFQAYSKMIEMSGHEPVDFKKPVEKVVEYIKAVFDLLNWNTDILGFNSNEELDNQPYYKLWHLLYSFEGDNTPTGNGRLIQKMTELYGFEKEYATILANVSFQDDYGSLSAKAIHKILPHLKEGNRYDVACVYAGYRHSESSLTREEIANKVLKDRLMLLPKNSLHNPVVEKILNQMVNVINVIIDIYGKPDEIRVELARELKKNAKEREELTKSIAQTTKAHEEYKTLLQTEFGLTNVSRTDILRYKLYKELESCGYKTLYSNTYISREKLFSKEFDIEHIIPQARLFDDSFSNKTLEARSVNIEKGNKTAYDFVKEKFGESGADNSLEHYLNNIEDLFKSGKISKTKYNKLKMAEQDIPDGFIERDLRNTQYIAKKALSMLNEISHRVVATSGSVTDKLREDWQLIDVMKELNWEKYKALGLVEYFEDRDGRQIGRIKDWTKRNDHRHHAMDALTVAFTKDVFIQYFNNKNASLDPNANEHAIKNKYFQNGRAIAPMPLREFRAEAKKHLENTLISIKAKNKVITGNINKTRKKGGVNKNMQQTPRGQLHLETIYGSGKQYLTKEEKVNASFDMRKIGTVSKSAYRDALLKRLYENDNDPKKAFAGKNSLDKQPIWLDKEQMRKVPEKVKIVTLEAIYTIRKEISPDLKVDKVIDVGVRKILIDRLNEYGNDAKKAFSNLDKNPIWLNKEKGISIKRVTISGISNAQSLHVKKDKDGKPILDENGRNIPVDFVNTGNNHHVAVYYRPVIDKRGQLVVDEAGNPKYELEEVVVSFFEAVTRANLGLPIIDKDYKTTEGWQFLFSMKQNEYFVFPNEKTGFNPKEIDLLDVENYGLISPNLFRVQKFSLKNYVFRHHLETTIKDTSSILRGITWIDFRSSKGLDTIVKVRVNHIGQIVSVGEY

SEQ ID NO: 27 - protein, 1314 aa, Mycoplasma synoviae
MLRLYCANNLVLNNVQNLWKYLLLLIFDKKIIFLFKIKVILIRRYMENNNKEKIVIGFDLGVASVGWSIVNAETKEVIDLGVRLFSEPEKADYRRAKRTTRRLLRRKKFKREKFHKLILKNAEIFGLQSRNEILNVYKDQSSKYRNILKLKINALKEEIKPSELVWILRDYLQNRGYFYKNEKLTDEFVSNSFPSKKLHEHYEKYGFFRGSVKLDNKLDNKKDKAKEKDEEEESDAKKESEELIFSNKQWINEIVKVFENQSYLTESFKEEYLKLFNYVRPFNKGPGSKNSRTAYGVFSTDIDPETNKFKDYSNIWDKTIGKCSLFEEEIRAPKNLPSALIFNLQNEICTIKNEFTEFKNWWLNAEQKSEILKFVFTELFNWKDKKYSDKKFNKNLQDKIKKYLLNFALENFNLNEEILKNRDLENDTVLGLKGVKYYEKSNATADAALEFSSLKPLYVFIKFLKEKKLDLNYLLGLENTEILYFLDSIYLAISYSSDLKERNEWFKKLLKELYPKIKNNNLEIIENVEDIFEITDQEKFESFSKTHSLSREAFNHIIPLLLSNNEGKNYESLKHSNEELKKRTEKAELKAQQNQKYLKDNFLKEALVPLSVKTSVLQAIKIFNQIIKNFGKKYEISQVVIEMARELTKPNLEKLLNNATNSNIKILKEKLDQTEKFDDFTKKKFIDKIENSVVFRNKLFLWFEQDRKDPYTQLDIKINEIEDETEIDHVIPYSKSADDSWFNKLLVKKSTNQLKKNKTVWEYYQNESDPEAKWNKFVAWAKRIYLVQKSDKESKDNSEKNSIFKNKKPNLKFKNITKKLFDPYKDLGFLARNLNDTRYATKVFRDQLNNYSKHHSKDDENKLFKVVCMNGSITSFLRKSMWRKNEEQVYRFNFWKKDRDQFFHHAVDASIIAIFSLLTKTLYNKLRVYESYDVQRREDGVYLINKETGEVKKADKDYWKDQHNFLKIRENAIEIKNVLNNVDFQNQVRYSRKANTKLNTQLFNETLYGVKEFENNFYKLEKVNLFSRKDLRKFILEDLNEESEKNKKNENGSRKRILTEKYIVDEILQILENEEFKDSKSDINALNKYMDSLPSKFSEFFSQDFINKCKKENSLILTFDAIKHNDPKKVIKIKNLKFFREDATLKNKQAVHKDSKNQIKSFYESYKCVGFIWLKNKNDLEESIFVPINSRVIHFGDKDKDIFDFDSYNKEKLLNEINLKRPENKKFNSINEIEFVKFVKPGALLLNFENQQIYYISTLESSSLRAKIKLLNKMDKGKAVSMKKITNPDEYKIIEHVNPLGINLNWTKKLENNN

SEQ ID NO: 28 - protein, 1368 aa, Streptococcus pyogenes
MDKKYSIGLDIGTNSVGWAVITDDYKVPSKKFKVLGNTDRHSIKKNLIGALLFDSGETAEATRLKRTARRRYTRRKNRICYLQEIFSNEMAKVDDSFFHRLEESFLVEEDKKHERHPIFGNIVDEVAYHEKYPTIYHLRKKLVDSTDKADLRLIYLALAHMIKFRGHFLIEGDLNPDNSDVDKLFIQLVQTYNQLFEENPINASGVDAKAILSARLSKSRRLENLIAQLPGEKKNGLFGNLIALSLGLTPNFKSNFDLAEDAKLQLSKDTYDDDLDNLLAQIGDQYADLFLAAKNLSDAILLSDILRLNSEITKAPLSASMIKRYDEHHQDLTLLKALVRQQLPEKYKEIFFDQSKNGYAGYIDGGASQEEFYKFIKPILEKMDGTEELLAKLNREDLLRKQRTFDNGSIPHQIHLGELHAILRRQEDFYPFLKDNREKIEKILTFRIPYYVGPLARGNSRFAWMTRKSEETITPWNFEEVVDKGASAQSFIERMTNFDKNLPNEKVLPKHSLLYEYFTVYNELTKVKYVTEGMRKPAFLSGEQKKAIVDLLFKTNRKVTVKQLKEDYFKKIECFDSVEISGVEDRFNASLGTYHDLLKIIKDKDFLDNEENEDILEDIVLTLTLFEDREMIEERLKTYAHLFDDKVMKQLKRRRYTGWGRLSRKLINGIRDKQSGKTILDFLKSDGFANRNFMQLIHDDSLTFKEDIQKAQVSGQGDSLHEHIANLAGSPAIKKGILQTVKVVDELVKVMGRHKPENIVIEMARENQTTQKGQKNSRERMKRIEEGIKELGSQILKEHPVENTQLQNEKLYLYYLQNGRDMYVDQELDINRLSDYDVDHIVPQSFIKDDSIDNKVLTRSDKNRGKSNNVPSEEVVKKMKNYWRQLLNAKLITQRKFDNLTKAERGGLSELDKAGFIKRQLVETRQITKHVAQILDSRMNTKYDENDKLIREVKVITLKSKLVSDFRKDFQFYKVREINNYHHAHDAYLNAVVGTALIKKYPKLESEFVYGDYKVYDVRKMIAKSEQEIGKATAKYFFYSNIMNFFKTEITLANGEIRKRPLIETNGETGEIVWDKGRDFATVRKVLSMPQVNIVKKTEVQTGGFSKESILPKRNSDKLIARKKDWDPKKYGGFDSPTVAYSVLVVAKVEKGKSKKLKSVKELLGITIMERSSFEKNPIDFLEAKGYKEVRKDLIVKLPKYSLFELENGRKRMLASAGELQKGNELALPSKYVNFLYLASHYEKLKGSPEDNEQKQLFVEQHKHYLDEIIEQISEFSKRVILADANLDKVLSAYNKHRDKPIREQAENIIHLFTLTNLGAPAAFKYFDTTIDRKRYTSTKEVLDATFIHQSITGLYETRIDLSQLGGD

SEQ ID NO: 29 - protein, 1368 aa, Streptococcus pyogenes
MDKKYSIGLDIGTNSVGWAVITDDYKVPSKKFKVLGNTDRHSIKKNLIGALLFDSGETAEATRLKRTARRRYTRRKNRICYLQEIFSNEMAKVDDSFFHRLEESFLVEEDKKHERHPIFGNIVDEVAYHEKYPTIYHLRKKLVDSTDKADLRLIYLALAHMIKFRGHFLIEGDLNPDNSDVDKLFIQLVQTYNQLFEENPINASGVDAKAILSARLSKSRRLENLIAQLPGEKKNGLFGNLIALSLGLTPNFKSNFDLAEDAKLQLSKDTYDDDLDNLLAQIGDQYADLFLAAKNLSDAILLSDILRVNTEITKAPLSASMIKRYDEHHQDLTLLKALVRQQLPEKYKEIFFDQSKNGYAGYIDGGASQEEFYKFIKPILEKMDGTEELLVKLNREDLLRKQRTFDNGSIPHQIHLGELHAILRRQEDFYPFLKDNREKIEKILTFRIPYYVGPLARGNSRFAWMTRKSEETITPWNFEEVVDKGASAQSFIERMTNFDKNLPNEKVLPKHSLLYEYFTVYNELTKVKYVTEGMRKPAFLSGEQKKAIVDLLFKTNRKVTVKQLKEDYFKKIECFDSVEISGVEDRFNASLGTYHDLLKIIKDKDFLDNEENEDILEDIVLTLTLFEDREMIEERLKTYAHLFDDKVMKQLKRRRYTGWGRLSRKLINGIRDKQSGKTILDFLKSDGFANRNFMQLIHDDSLTFKEDIQKAQVSGQGDSLHEHIANLAGSPAIKKGILQTVKVVDELVKVMGRHKPENIVIEMARENQTTQKGQKNSRERMKRIEEGIKELGSQILKEHPVENTQLQNEKLYLYYLQNGRDMYVDQELDINRLSDYDVDHIVPQSFLKDDSIDNKVLTRSDKNRGKSDNVPSEEVVKKMKNYWRQLLNAKLITQRKFDNLTKAERGGLSELDKAGFIKRQLVETRQITKHVAQILDSRMNTKYDENDKLIREVKVITLKSKLVSDFRKDFQFYKVREINNYHHAHDAYLNAVVGTALIKKYPKLESEFVYGDYKVYDVRKMIAKSEQEIGKATAKYFFYSNIMNFFKTEITLANGEIRKRPLIETNGETGEIVWDKGRDFATVRKVLSMPQVNIVKKTEVQTGGFSKESILPKRNSDKLIARKKDWDPKKYGGFDSPTVAYSVLVVAKVEKGKSKKLKSVKELLGITIMERSSFEKNPIDFLEAKGYKEVKKDLIIKLPKYSLFELENGRKRMLASAGELQKGNELALPSKYVNFLYLASHYEKLKGSPEDNEQKQLFVEQHKHYLDEIIEQISEFSKRVILADANLDKVLSAYNKHRDKPIREQAENIIHLFTLTNLGAPAAFKYFDTTIDRKRYTSTKEVLDATLIHQSITGLYETRIDLSQLGGD

SEQ ID NO: 30 - protein, 1370 aa, Streptococcus agalactiae; identical to SEQ ID NO: 11

SEQ ID NO: 31 - protein, 1173 aa, Rhodospirillum rubrum
MRPIEPWILGLDIGTDSLGWAVFSCEEKGPPTAKELLGGGVRLFDSGRDAKDHTSRQAERGAFRRARRQTRTWPWRRDRLIALFQAAGLTPPAAETRQIALALRREAVSRPLAPDALWAALLHLAHHRGFRSNRIDKRERAAAKALAKAKPAKATAKATAPAKEADDEAGFWEGAEAALRQRMAASGAPTVGALLADDLDRGQPVRMRYNQSDRDGVVAPTRALIAEELAEIVARQSSAYPGLDWPAVTRLVLDQRPLRSKGAGPCAFLPGEDRALRALPTVQDFIIRQTLANLRLPSTSADEPRPLTDEEHAKALALLSTARFVEWPALRRALGLKRGVKFTAETERNGAKQAARGTAGNLTEAILAPLIPGWSGWDLDRKDRVFSDLWAARQDRSALLALIGDPRGPTRVTEDETAEAVADAIQIVLPTGRASLSAKAARAIAQAMAPGIGYDEAVTLALGLHHSHRPRQERLARLPYYAAALPDVGLDGDPVGPPPAEDDGAAAEAYYGRIGNISVHIALNETRKIVNALLHRHGPILRLVMVETTRELKAGADERKRMIAEQAERERENAEIDVELRKSDRWMANARERRQRVRLARRQNNLCPYTSTPIGHADLLGDAYDIDHVIPLARGGRDSLDNMVLCQSDANKTKGDKTPWEAFHDKPGWIAQRDDFLARLDPQTAKALAWRFADDAGERVARKSAEDEDQGFLPRQLTDTGYIARVALRYLSLVTNEPNAVVATNGRLTGLLRLAWDITPGPAPRDLLPTPRDALRDDTAARRFLDGLTPPPLAKAVEGAVQARLAALGRSRVADAGLADALGLTLASLGGGGKNRADHRHHFIDAAMIAVTTRGLINQINQASGAGRILDLRKWPRTNFEPPYPTFRAEVMKQWDHIHPSIRPAHRDGGSLHAATVFGVRNRPDARVLVQRKPVEKLFLDANAKPLPADKIAEIIDGFASPRMAKRFKALLARYQAAHPEVPPALAALAVARDPAFGPRGMTANTVIAGRSDGDGEDAGLITPFRANPKAAVRTMGNAVYEVWEIQVKGRPRWTHRVLTRFDRTQPAPPPPPENARLVMRLRRGDLVYWPLESGDRLFLVKKMAVDGRLALWPARLATGKATALYAQLSCPNINLNGDQGYCVQSAEGIRKEKIRTTSCTALGRLRLSKKAT

SEQ ID NO: 32 - protein, 997 aa, Maritimibacter alkaliphilus
MKVLVDAGLMPSDPAAAKALETLDPYELRATGLDVMLPLTHLGRAVFHLNQRRGFKSNRKTDRGDNESGKIKDATKRLTWAMQEAGARTYGEFLHMRRARASDPRQVPSVRTRLSVASRGGPDSKEEAGYDFYPERAHLEDEFHALWSAQAAFHPDLTCELRDVVFEKIFYQRPLKEPKVGLCLFTAEERLPKAHPLTGRRVLYETVNQLRVTADGRTTRPLTLEERDMIVYALDNKKPVKSLSSMHLKLVALGKLVKLKDGERFTLESGVRDAIACDPIRATMGHPDGFGPAWSRLDWQAQWALIEKLRQVQSDDDFASLVAWLGATHNLSEDHAKRVANLHLPEGYGRLGLTATEAILCNLKAEVCTYSQAVERWGKHHSNQRTGECLEALPYYGEVLDRHVIPGTYNEDDDDVTRYGRITNPTVHIGLNQLRRLVNRIIATYGKPDQIVVELARELKQSEAQKSEALKKIRDTTADAIRRGRQLEEIGQKNTGANRLLLRLWEDLGPAVGPRCCPYTGKPISVTMLFDGACDVDHILPYSRTLDDSFANRTICLREANRQKGDRTPWEAWGGSDQWDAIEANLKDLPENKRKRFAPDAMERFEGERDFLDRALVDTQYLARISRAYLDTLFTEGGHVWVVPGRMTEMLRRHWGLNALLSDKDRGAGKVKNRTDHRHHAIDAAVIAATDHSLVNRISKAAGQGESAGQSAELIARDTPEPWEGFRNDISAQIARIVVSHRADHGRIDVEGRKHGKDSTAGRLHNDTAYGIVDDHTVVSRTPLLSLKPGDIEVTTKGKNIRDTQLQKALSVATTGKDGKGFEEALRNFAEKEGPYQGIRRVRLIETLQSSARVEVGSDEDGQPLKAYKGDSNHCYDLWKLPDGKVVPHVVSTYEAHAGTDKRPHPAAKRILRVFKKDMVAIEQDDQTAIFYVQKLDRANGLFLAPHLEANADARHRNPNDAFKFLQMGAGSVVRNKLRRVYVDEIGRIKDPGPPKH

SEQ ID NO: 33 - protein, 1027 aa, Blastopirellula marina
MFSESGDQPSLVDCGVRIFPEGVERDQQGGEKSKSQSRRVARGIRRQVRRRAQRLRHLKHALITTGLFPADVVDQQEVLASNPYELRSRALSEKLEPYEIGRILLHLAKRRGFLSNRTTDRSGGNELKGILAEMTQLQGEIAAHGCQTLGQYLHQLGDDGETFAQRLRGRHTLRAMYEDEFEKIWERQASYYPALLTEELRGGEEGKQSYPLVPTARRKSESLLKRFGLHGLLFFQRKMYWPKSVIGRCDLEPKEKRCPKADRLAQRFRILQEVNNLRLISPADRKEYTFAEFVGAGADKKLVDYLCEAKERTFPQIRKKFKLPETISFNYERGERSKLQGHETDAHFNGKKGLGKRRWSEIAEDVKDHIIQIVLEEDREDVALRKLTQDCSLTVEEAHKAMALHLPAGYSQYSRVAISRLLPHLELGKLLMGNDASDSAMHAAGYLRPDEREVRQYDLLPEPPDIPNPLVRQALYEVRKVINAIIREYGALGTIRVELAREAKKSAEQRTQIRIANAKRERENAAIAKTLQEMSPAIRPTRRNIQRYLLWKDQGGVCIYTGKVISQAQLFDSGEVDVDHILPRWRSLDDSMANKVIAHRSANNEKGDRTPWEWLGHDKPRFDELLLRAQRLPYGKRQRFIQKEVELTNFVERQLRDTTYVSRLVVQYLKGLGVPITTVKGPMTAELRHHWGLNALLNEDGSQKKNRSDHRHHAIDAIVIGLTDAKRLHALANARGKDLQPPWSEFRSDVATALGRMAVSHRVRRRIQGALHEETIYGPTQKAAQPTSTDQRPWAKDWIEDSQIVVRRKSVSDLTNTKHLAKIRDVTIRKILEDHLRRQKVDPTKPGVIPKDAFAGSNAPQMPSGVPIKKVRLVERGETWRKIGSGEASKFIKPGSNHHISYFAISRKGRESWKAHVTIMLDAACIAKESINNGKIVNRSIGDQGRFLMSLSIGEMFEITNNGGEILLCVVRKIDQSGRIYYKIHDDARESMDLKKDNLYMSPSKMQQFDARKVTVTPLGKIRNAND

SEQ ID NO: 34 - protein, 158 aa, Francisella tularensis
MIDFLLELDPCITIPPYLDNNNRKPPKCQSLILNPKFLDNQYPNWQQYLQELKKLQSIQDYLDSFETDLKDLKSSKDQPYFVEYKSSNQQMASGQRDYKDLDARILQFIFDRVKASDELLLSEIYFQAKKLKQKASSELEKLESSKKLDEVIANSQLS

SEQ ID NO: 35 - protein, 393 aa, Francisella tularensis
MNVKILPIAIDLDVKNTGVFSAFYQKGTSLEKLDNKNGKVYELSKDSYTLLMNNRTAQRHQRRGIDRKQLVKRLFKLVWTEQLNLEWDKDTQQAISFLFNRRGFSFITDGYSTEYLNIVPEQVKAILMDIFDDYNGEDDLDSYLKLATEQESKISEIYNKLMQKILEFKLRKLCTDIKDDKVSTKTLKEITSYEFELLADYLANYSESLKTQKFSYTDKQGNLKELSYYHHDKYNIQEFLKRHATINDEILDTLLTDDFDIWNFNFEKFDFDKNEEKLQSQEDKDHTQAYFHHFVFAVNKIKSEMASGGRHRSQYFQEITNVLDENNHQEGYLKNFCENLHNKKYSNLSVKNLVNLVGNLSNLELKPLRKYFNDKNLIIGMSKSLQKLIATGY

SEQ ID NO: 36 - protein, 1066 aa, Rhodopseudomonas palustris
MSERVVRRILGIDLGIASCGWGVVDISGAGGGIIATGVRCFDAPLIDKTGEPKSATRRTARGQRRIVRRRRQRMNGVRRLLCEFGLLPDPRPDALNQAMRRISTASAAAQVTPWTLRAAAHQRLLSNEELAVVLGHIARHRGFRSNAKNEAGANAADETSKMKKAMEATREGLAKYHAFGDMIANDPKFANRKRNRDKDYSHTAKRSDLEDEVRAILRAQLRFGSAAATETLAQTFADVAFFQRPLQDSEDRVGDCPFEPGQKRAARRAPSFELFRFLSRLANLKLAVGRSPERRLTAEEIALAAKGFGETKKTITFKSLREALDLDPNARFSGIGKDKEASLDVVARTGGAAYGTKTLKDALGDAPWRSLSRTPETLDRIAEILSFREDITSIRNGLEDLGLDSLVVEALMQAAANGDFKEFTRAGHISARAARNIIPGLREGLVYSEACARVGYDHAARLSVPLDQVGSPVTRKALSEALKQVRAVAREYGPIDYFHIELARSVGKSAEERKQLTDGIEARNVEKAKRRKQAEEHLGRAPSDDELLRYELAKEQNFKCIYSGDAIDPAGVAANDTRYQVDHILPWSRFGDDSYLNKTLCTARSNQNKRGRTPFEWFEADKTDVEWMEYVARVENLQEVKGRKKRNYSIKDAAAIEDKFKARNLTDTQWATRLLADELSRMFPPRECERAICGRADGGNDGLTIVEERRVFTRPGAITSKLRRAWGLEGLKKQDGKRVEDDRHHAVDALVLAATTESLLQRLTVEVQRREREGRPDDIFHCAEPWRGFRADVRRTVYGSETMPGIFVSRAERRRARGKAHDATIKQIREIEGERLVFERKPVEKLTDKDLEKIPIPKPYGQVSDPKRLRDELVESLRAWIAAGKPKDRPPLSPKGDVIRKVRIQTNDKVSVEINGGTVDRGDMARVDVFRKKNKKAVWEYYVVPIYPHQIVALNDPPDRAVIAYAEDKDWKEIDSSYEFLWSLFGLSYVEISKANGECIDGYFRGLHRGTGAASVCKHISLGKDATVSGIGLKTLASFKKFTIDRLGRKFEIPREVRTWRGEACT

SEQ ID NO: 37 - protein, 1149 aa, Lactobacillus salivarius
MERYHIGLDIGTSSIGWAVIGDDFKIKRKKGKNLIGVRLFKEGDTAAERRGFRTQRRRLNRRKWRLKLLEEIFDPYMAEVDKYFFARLKESNLSPKDSNKKYLGSLLFPDISDSNFYDKYPTIYHLRRDLMEKDKKFDLREIYLAIHHIVKYRGNFLEKVPAKNYKNSGASIGFLLEEVNDLYGNIIGNEDVAILDNDKFEDVEKIILNDEIRNIDKQKNVGRLLVKDKKEKNIVTAFSKAIFGYKFNLEDLLLIESDEKNKLTFNDENIDDIFNELSHSLNDNQMDLLTKTREIYFKFKLNMIVPTGYTISESMIEKYEMHKAHLKMYKEFINTLNAKDRKILKNAYSDYINNEKAKAANAQENFYKTVKKTIKENDSDTAKKIIGLIDEGNFMPKQRTGENGVIPHQLHQIELDRIIENQAKYYPWLAEENPVEKNRKFAKYKLDELVTFRVPYYVGPLIDKTESNKNEKETKFAWMVRKAKGTITPWNFENLVDRTESANRFIKRMTSKDTYIIGEDVLPASSLLYEKYKVLNELNNIKVNKKKLDVEQKQHVYLDLFTTRKNVTKDDLATSLNCDVESITGLTDNKKFNSSLSSYIDLKAILGNIVDDYSKNEDLEKIIEYSTIFEDGNIYKEKLSEISWLTDEQIEKLSNIHFKGWGRLSKKLLTQITNENGERIIDTLWNTSNNFIQVISDESIQAKLAEINGEYANKYNLEDILDEAYTSPQNKKAIRQVMKVVEDIEKAMKCEPTSIAIEFTREKRKSKLTNTRYKKISETYEKITDELISEYELGKLQSELDSKVNNMRDRYYLYFMQLGRDMYTGEKMNIDELHQKYDIDHILPQSFIKDDSLNNRVLTSKSVNIKEKSDKTAADLYAAKMGDFWRKLRKQGLMTEQKYKNLLTRTDSINKYTKQSFIKRQLVETSQVVKLAANILQDKYRNTKIIEIRARLNSDLRKKYELIKNREVNDYHHAIDGYLTTFVGQYLYKVYPKLRSYFVYDDFKKLDSNYLKHMDKFNFIWKLEDKKAEDVYDKVNDEFVLNVPEMKEYIRKIYNYKYMLVSKEVTTKNGAFYDQTKYNAKTINLIPIKKDKPTNIYGGYKGKVSSYMMLVKIQKKKEVIYKFVGVPRLWTDELDRLIDTDEKKALLKK

SEQ ID NO: 38 - protein, 1064 aa, Rhodopseudomonas palustris
MSECVTRRILGIDLGIASCGWGVIEVGEASGSIIASGVRCFDAPLIDKTGEPKSATRRTARGQRRIIRRRRQRMNAVRRLLAEFGVLTGRSPDALHQALLRLSQSVAGSQVTPWTLRAAAHERKLTNDELAVVLGHIARHRGFRSNSKNDGGANAADETSKMKKAMETTREGLARYHSFGAMIASDPKFADRKRNRDKDYSHTAKRSDLEDEVRTIFRSQTRFGSLVASEKLSQAFADAAFFQRPLQDSEDMVGSCPFEPGQKRTARRAPSFELFRFLSRLANLKLTVGRAPERRLTPDEIALAAKGFGETKKSITFKSLREALDLDPNARFSGVAKEKESTLDVAARTGGAAYGTKTLKDALGDAPWRSLSRMPEKLDRIAEILSFREDMKAIRNGLEEVGLDGLVVDALMQATANGDFKDFTRAAHISALAARNIIPGLREGLVYSDACTRVGYDHAARPAVPLSQIGSPVTRKALSEALKQVRAVAREYGPIDYFHIELARSIGKSAEERKKLTDGIEARNVEKEKRRKEAAEHLGRAPSDDELLRYELAKEQNFKCIYSGDPIDPAGISANDTRYQVDHILPWSRFGDDSYVNKTLCTARSNQNKRGRTPFEWFDADKTEAEWMEYSARVEDLKEVKGRKKRNYSIKDAASVEDKFKARNLTDTQWATRLLADELKRMFPPRECERVVTVRADGGNDGLSIVEERRVFTRPGAITSKLRRAWGLEGLKKQDGKRVEDDRHHAVDALVLAATTESLLNRLTVEVQQREREGRQDDIFHCSQPWPGFRVDVQRTVYGSETMPGIFVSRAERRRARGKAHDATVKQIRDIDGERIVFERKPIEKLTDKDLERIPVPEPYGKAADPKKLRDELVENLRAWIAAGKPKDKPPRSPKGDIIRKVRIETKDKVAVEINGGTVDRGDMARVDVFRKKNKKGVWEFYVIPIYPHQIVASALPPNRAVIAYKAESEWTAIDGCFEFAWSLNPMSYLELVKSNGELIEGYFRSMDRTTGAINLSPMSTNSETIRSIGVKTLSSFRKFTVDRLGRKFEIPREVRTWRGEACT

SEQ ID NO: 39 - protein, 1166 aa, Nitrobacter hamburgensis
MHVEIDFPHFSRGDSHLAMNKNEILRGSSVLYRLGLDLGSNSLGWFVTHLEKRGDRHEPVALGPGGVRIFPDGRDPQSGTSNAVDRRMARGARKRRDRFVERRKELIAALIKYNLLPDDARERRALEVLDPYALRKTALTDTLPAHHVGRALFHLNQRRGFQSNRKTDSKQSEDGAIKQAASRLATDKGNETLGVFFADMHLRKSYEDRQTAIRAELVRLGKDHLTGNARKKIWAKVRKRLFGDEVLPRADAPHGVRARATITGTKASYDYYPTRDMLRDEFNAIWAGQSAHHATITDEARTEIEHIIFYQRPLKPAIVGKCTLDPATRPFKEDPEGYRAPWSHPLAQRFRILSEARNLEIRDTGKGSRRLTKEQSDLVVAALLANREVKFDKLRTLLKLPAEARFNLESDRRAALDGDQTAARLSDKKGFNKAWRGFPPERQIAIVARLEETEDENELIAWLEKECALDGAAAARVANTTLPDGHCRLGLRAIKKIVPIMQDGLDEDGVAGAGYHIAAKRAGYDHAKLPTGEQLGRLPYYGQWLQDAVVGSGDARDQKEKQYGQFPNPTVHIGLGQLRRVVNDLIDKYGPPTEISIEFTRALKLSEQQKAERQREQRRNQDKNKARAEELAKFGRPANPRNLLKMRLWEELAHDPLDRKCVYTGEQISIERLLSDEVDIDHILPVAMTLDDSPANKIICMRYANRHKRKQTPSEAFGSSPTLQGHRYNWDDIAARATGLPRNKRWRFDANAREEFDKRGGFLARQLNETGWLARLAKQYLGAVTDPNQIWVVPGRLTSMLRGKWGLNGLLPSDNYAGVQDKAEEFLASTDDMEFSGVKNRADHRHHAIDGLVTALTDRSLLWKMANAYDEEHEKFVIEPPWPTMRDDLKAALEKMVVSHKPDHGIEGKLHEDSAYGFVKPLDATGLKEEEAGNLVYRKAIESLNENEVDRIRDIQLRTIVRDHVNVEKTKGVALADALRQLQAPSDDYPQFKHGLRHVRILKKEKGDYLVPIANRASGVAYKAYSAGENFCVEVFETAGGKWDGEAVRRFDANKKNAGPKIAHAPQWRDANEGAKLVMRIHKGDLIRLDHEGRARIMVVHRLDAAAGRFKLADHNETGNLDKRHATNNDIDPFRWLMASYNTLKKLAAVPVRVDELGRVWRVMPN

SEQ ID NO: 40 - protein, 641 aa, Nitrobacter hamburgensis
MHKRNSRSYRLGLDLGSNSLGWFVTHLEKRGDRYEPVALDPGGVRIFPDGRDPQSGMSNAVDRRMARGARKRRDRFVDPYALRKAALTNALPAHRVGRAIFHLNQRRGFQSNRKTDRKQSEDGAIKQAASKLKARMHEEAAPTLGAFFADMHLRKSYDDQQTAIRAELVRLGKDHLTGNARKKVWAKVRKRLFGDEVLRPKDTSDGARARATTTGTKASYDFYPTRAMLLDEFNAIWAAQREHHLAMTDEAKAEIEHIIFYHRPLKPAIVGKCTLDPATRPFKEDPEGYRAPWSHPLAQRFRILSEARNLEIRETGKTSRRLTKDQSDLVVAALLANREVKFDKLRTLLKLPAEARFNLESDRRSTATRPPHGCRTRRASIRRGAGFLRNGRSRSSPDWKKPKTKTNCSHGSKWNAHLTAQRPRASPIRRCRTAIAGSACAQSKRSCRSCRTSSMRMALRAPAITSWPSVPATTIPVDTFQQGGNAFGRILSVVTIELFAITDRVDPVQEQDARCFALRIAECRSDGLQHFAEVSLGLPPRNAAQDQRHSAGLCQSSCVGRFVPGTPCRRTPRSTSLHGKEPSAHAFGSTARSRPQLPASPRPCMSFRDGTSSSPARMPETLDRCAISRSNRSSVCRAERL

SEQ ID NO: 41 - protein, 1368 aa, Streptococcus pyogenes
MDKKYSIGLDIGTNSVGWAVITDDYKVPSKKFKVLGNTDRHSIKKNLIGALLFDSGEIAEATRLKRTARRRYTRRKNRICYLQEIFSNEMAKVDDSFFHRLEESFLVEEDKKHERHPIFGNIVDEVAYHEKYPTIYHLRKKLVDSTDKADLRLIYLALAHMIKFRGHFLIEGDLNPDNSDVDKLFIQLVQTYNQLFEENPINASGVDAKAILSARLSKSRRLENLIAQLPGEKKNGLFGNLIALSLGLTPNFKSNFDLAEDAKLQLSKDTYDDDLDNLLAQIGDQYADLFLAAKNLSDAILLSDILRLNSEITKAPLSASMIKRYDEHHQDLTLLKALVRQQLPEKYKEIFFDQSKNGYAGYIDGGASQEEFYKFIKPILEKMDGTEELLAKLNREDLLRKQRTFDNGSIPHQIHLGELHAILRRQEDFYPFLKDNREKIEKILTFRIPYYVGPLARGNSRFAWMTRKSEETITPWNFEEVVDKGASAQSFIERMTNFDKNLPNEKVLPKHSLLYEYFTVYNELTKVKYVTEGMRKPAFLSGEQKKAIVDLLFKTNRKVTVKQLKEDYFKKIECFDSVEISGVEDRFNASLGTYHDLLKIIKDKDFLDNEENEDILEDIVLTLTLFEDREMIEERLKTYAHLFDDKVMKQLKRRRYTVWGRLSRKLINGIRDKQSGKTILDFLKSDGFANRNFMQLIHDDSLTFKEDIQKAQVSGQGDSLHEHIANLAGSPAIKKGILQTVKVVDELVKVMGRHKPENIVIEMARENQTTQKGQKNSRERMKRIEEGIKELGSQILKEHPVENTQLQNEKLYLYYLQNGRDMYVDQELDINRLSDYDVDHIVPQSFIKDDSIDNKVLTRSDKNRGKSDNVPSEEVVKKMKNYWRQLLNAKLITQRKFDNLTKAERGGLSELDKAGFIKRQLVETRQITKHVAQILDSRMNTKYDENDKLIREVKVITLKSKLVSDFRKDFQFYKVREINNYHHAHDAYLNAVVGTALIKKYPKLESEFVYGDYKVYDVRKMLAKSEQEIGKATAKYFFYSNIMNFFKTEITLANGEIRKRPLIETNGETGEIVWDKGRDFATVRKVLSMPQVNIVKKTEVQTGGFSKESILPKRNSDKLIARKKDWDPKKYGGFDSPTVAYSVLVVAKVEKGKSKKLKSVKELLGITIMERSSFEKNPIDFLEAKGYKEVRKDLIIKLPKYSLFELENGRKRMLASAGELQKGNELALPSKYVNFLYLASHYEKLKGSPEDNEQKQLFVEQHKHYLDEIIEQISEFSKRVILADANLDKVLSAYNKHRDKPIREQAENIIHLFTLTNLGAPTAFKYFDTTIDRKRYTSTKEVLDATFIHQSITGLYETRIDLSQLGGD

SEQ ID NO: 42 - protein, 1368 aa, Streptococcus pyogenes
MDKKYSIGLDIGTNSVGWAVITDDYKVPSKKFKVLGNTDRHSIKKNLIGALLFDSGETAEATRLKRTARRRYTRRKNRICYLQEIFSNEMAKVDDSFFHRLEESFLVEEDKKHERHPIFGNIVDEVAYHEKYPTIYHLRKKLVDSTDKADLRLIYLALAHMIKFRGHFLIEGDLNPDNSDVDKLFIQLVQTYNQLFEENPINASGVDAKAILSARLSKSRRLENLIAQLPGEKKNGLFGNLIALSLGLTPNFKSNFDLAEDAKLQLSKDTYDDDLDNLLAQIGDQYADLFLAAKNLSDAILLSDILRLNSEITKAPLSASMIKRYDEHHQDLTLLKALVRQQLPEKYKEIFFDQSKNGYAGYIDGGASQEEFYKFIKPILEKMDGTEELLAKLNREDLLRKQRTFDNGSIPHQIHLGELHAILRRQEDFYPFLKDNREKIEKILTFRIPYYVGPLARGNSRFAWMTRKSEETITPWNFEEVVDKGASAQSFIERMTNFDKNLPNEKVLPKHSLLYEYFTVYNELTKVKYVTEGMRKPAFLSGEQKKAIVDLLFKTNRKVTVKQLKEDYFKKIECFDSVEISGVEDRFNASLGTYHDLLKIIKDKDFLDNEENEDILEDIVLTLTLFEDREMIEERLKTYAHLFDDKVMKQLKRRRYTGWGRLSRKLINGIRDKQSGKTILDFLKSDGFANRNFMQLIHDDSLTFKEDIQKAQVSGQGDSLHEHIANLAGSPAIKKGILQTVKVVDELVKVMGRHKPENIVIEMARENQTTQKGQKNSRERMKRIEEGIKELGSQILKEHPVENTQLQNEKLYLYYLQNGRDMYVDQELDINRLSDYDVDHIVPQSFIKDDSIDNKVLTRSDKNRGKSDNVPSEEVVKKMKNYWRQLLNAKLITQRKFDNLTKAERGGLSELDKAGFIKRQLVETRQITKHVAQILDSRMNTKYDENDKLIREVKVITLKSKLVSDFRKDFQFYKVREINNYHHAHDAYLNAVVGTALIKKYPKLESEFVYGDYKVYDVRKMIAKSEQEIGKATAKYFFYSNIMNFFKTEITLANGEIRKRPLIETNGETGEIVWDKGRDFATVRKVLSMPQVNIVKKTEVQTGGFSKESILPKRNSDKLIARKKDWDPKKYGGFDSPTVAYSVLVVAKVEKGKSKKLKSVKELLGLTIMERSSFEKNPIDFLEAKGYKEVKKDLIIKLPKYSLFELENGRKRMLASAGELQKGNELALPSKYVNFLYLASHYEKLKGSPEDNEQKQLFVEQHKHYLDEIIEQISEFSKRVILADANLDKVLSAYNKHRDKPIREQAENIIHLFTLTNLGAPAAFKYFDTTIDRKRYTSTKEVLDATLIHQSITGLYETRIDLSQLGGD

SEQ ID NO: 43 - protein, 1368 aa, Streptococcus pyogenes
MDKKYSIGLDIGTNSVGWAVITDDYKVPSKKFKVLGNTDRHSIKKNLIGALLFDSGEIAEATRLKRTARRRYTRRKNRICYLQEIFSNEMAKVDDSFFHRLEESFLVEEDKKHERHPIFGNIVDEVAYHEKYPTIYHLRKKLVDSTDKADLRLIYLALAHMIKFRGHFLIEGDLNPDNSDVDKLFIQLVQTYNQLFEENPINASGVDAKAILSARLSKSRRLENLIAQLPGEKKNGLFGNLIALSLGLTPNFKSNFDLAEDAKLQLSKDTYDDDLDNLLAQIGDQYADLFLAAKNLSDAILLSDILRLNSEITKAPLSASMIKRYDEHHQDLTLLKALVRQQLPEKYKEIFFDQSKNGYAGYIDGGASQEEFYKFIKPILEKMDGTEELLAKLNREDLLRKQRTFDNGSIPHQIHLGELHAILRRQEDFYPFLKDNREKIEKILTFRIPYYVGPLARGNSRFAWMTRKSEETITPWNFEEVVDKGASAQSFIERMTNFDKNLPNEKVLPKHSLLYEYFTVYNELTKVKYVTEGMRKPAFLSGEQKKAIVDLLFKTNRKVTVKQLKEDYFKKIECFDSVEISGVEDRFNASLGTYHDLLKIIKDKDFLDNEENEDILEDIVLTLTLFEDREMIEERLKTYAHLFDDKVMKQLKRRRYTGWGRLSRKLINGIRDKQSGKTILDFLKSDGFANRNFMQLIHDDSLTFKEDIQKAQVSGQGDSLHEHIANLAGSPAIKKGILQTVKVVDELVKVMGRHKPENIVIEMARENQTTQKGQKNSRERMKRIEEGIKELGSQILKEHPVENTQLQNEKLYLYYLQNGRDMYVDQELDINRLSDYDVDHIVPQSFIKDDSIDNKVLTRSDKNRGKSDNVPSEEVVKKMKNYWRQLLNAKLITQRKFDNLTKAERGGLSELDKAGFIKRQLVETRQITKHVAQILDSRMNTKYDENDKLIREVKVITLKSKLVSDFRKDFQFYKVREINNYHHAHDAYLNAVVGTALIKKYPKLESEFVYGDYKVYDVRKMLAKSEQEIGKATAKYFFYSNIMNFFKTEITLANGEIRKRPLIETNGETGEIVWDKGRDFATVRKVLSMPQVNIVKKTEVQTGGFSKESILPKRNSDKLIARKKDWDPKKYGGFDSPTVAYSVLVVAKVEKGKSKKLKSVKELLGITIMERSSFEKNPIDFLEAKGYKEVRKDLIIKLPKYSLFELENGRKRMLASAGELQKGNELALPSKYVNFLYLASHYEKLKGSPEDNEQKQLFVEQHKHYLDEIIEQISEFSKRVILADANLDKVLSAYNKHRDKPIREQAENIIHLFTLTNLGAPTAFKYFDTTIDRKRYTSTKEVLDATFIHQSITGLYETRIDLSQLGGD

SEQ ID NO: 44 - protein, 1371 aa, Streptococcus pyogenes
MDKKYSIGLDIGTNSVGWAVITDDYKVPSKKFKVLGNTDRHSIKKNLIGALLFDSGETAEATRLKRTARRRYTRRKNRICYLQEIFSNEMAKVDDSFFHRLEESFLVEEDKKHERHPIFGNIVDEVAYHEKYPTIYHLRKKLADSTDKADLRLIYLALAHMIKFRGHFLIEGDLNPDNSDVDKLFIQLVQTYNQLFEENPINASRVDAKAILSARLSKSRRLENLIAQLPGEKKNGLFGNLIALSLGLTPNFKSNFDLAEDAKLQLSKDTYDDDLDNLLAQIGDQYADLFLAAKNLSDATLLSDILRVNSEITKAPLSASMIKRYDEHHQDLTLLKALVRQQLPEKYKEIFFDQSKNGYAGYIDGGASQEEFYKFIKPILEKMDGTEELLAKLNREDLLRKQRTFDNGSIPHQIHLGELHAILRRQEDFYPFLKDNREKIEKILTFRIPYYVGPLARGNSRFAWMTRKSEETITPWNFEEVVDKGASAQSFIERMTNFDKNLPNEKVLPKHSLLYEYFTVYNELTKVKYVTEGMRKPAFLSGEQKKAIVDLLFKTNRKVTVKQLKEDYFKKIECFDSVEISGVEDRFNASLGTYHDLLKIIKDKDFLDNEENEDILEDIVLTLTLFEDKEMIEERLKTYAHLFDDKVMKQLKRRHYTGWGRLSRKLINGIRDKQSGKTILDFLKSDGFANRNFIQLIHDDSLTFKEAIQKAQVSGQGHSLHEQIANLAGSPAIKKGILQSVKVVDELVKVMGHKPENIVIEMARENQTTQKGQKNSRERMKRIEEGIKELGSQILKEHPVENTQLQNEKLYLYYLQNGRDMYVDQELDINRLSDYDVDHIVPQSFIKDDSIDNKVLTRSDKNRGKSDDVPSEEVVKKMKNYWRQLLNAKLITQRKFDNLTKAERGGLSELDKAGFIKRQLVETRQITKHVAQILDSRMNTKYDENDKLIREVKVITLKSKLVSDFRKDFQFYKVREINNYHHAHDAYLNAVVGTALIKKYPKLESEFVYGDYKVYDVRKMIAKSEQEIGKATAKRFFYSNIMNFFKTEITLANGEIRKRPLIETNEETGEIVWDKGRDFATVRKVLSMPQVNIVKKTEVQTGALTNESIYARGSFDKLISRKHRFESSKYGGFGSPTVTYSVLVVAKSKVQDGKVKKIKTGKELIGITLLDKLVFEKNPLKFIEDKGYGNVQIDKCIKLPKYSLFEFENGTRRMLASVMANNNSRGDLQKANEMFLPAKLVTLLYHAHKIESSKELEHEAYILDHYNDLYQLLSYIERFASLYVDVEKNISKVKELFSNIESYSISEICSSVINLLTLTASGAPADFKFLGTTIPRKRYGSPQSILSSTLIHQSITGLYETRIDLSQLGSD

SEQ ID NO: 45 - protein, 1121 aa, Streptococcus thermophilus
MSDLVLGLDIGIGSVGVGILNKVTGEIIHKNSRIFPAAQAENNLVRRTNRQGRRLARRKKHRRVRLNRLFEESGLITDFTKISINLNPYQLRVKGLTDELSNEELFIALKNMVKHRGISYLDDASDDGNSSVGDYAQIVKENSKQLETKTPGQIQLERYQTYGQLRGDFTVEKDGKKHRLINVFPTSAYRSEALRILQTQQEFNPQITDEFINRYLEILTGKRKYYHGPGNEKSRTDYGRYRTSGETLDNIFGILIGKCTFYPDEFRAAKASYTAQEFNLLNDLNNLTVPTETKKLSKEQKNQIINYVKNEKAMGPAKLFKYIAKLLSCDVADIKGYRIDKSGKAEIHTFEAYRKMKTLETLDIEQMDRETLDKLAYVLTLNTEREGIQEALEHEFADGSFSQKQVDELVQFRKANSSIFGKGWHNFSVKLMMELIPELYETSEEQMTILTRLGKQKTTSSSNKTKYIDEKLLTEEIYNPVVAKSVRQAIKIVNAAIKEYGDFDNIVIEMARETNEDDEKKAIQKIQKANKDEKDAAMLKAANQYNGKAELPHSVFHGHKQLATKIRLWHQQGERCLYTGKTISIHDLINNSNQFEVDHILPLSITFDDSLANKVLVYATANQEKGQRTPYQALDSMDDAWSFRELKAFVRESKTLSNKKKEYLLTEEDISKFDVRKKFIERNLVDTRYASRVVLNALQEHFRAHKIDTKVSVVRGQFTSQLRRHWGIEKTRDTYHHHAVDALIIAASSQLNLWKKQKNTLVSYSEDQLLDIETGELISDDEYKESVFKAPYQHFVDTLKSKEFEDSILFSYQVDSKFNRKISDATIYATRQAKVGKDKADETYVLGKIKDIYTQDGYDAFMKIYKKDKSKFLMYRHDPQTFEKVIEPILENYPNKQINEKGKEVPCNPFLKYKEEHGYIRKYSKKGNGPEIKSLKYYDSKLGNHIDITPKDSNNKVVLQSVSPWRADVYFNKTTGKYEILGLKYADLQFEKGTGTYKISQEKYNDIKKKEGVDSDSEFKFTLYKNDLLLVKDTETKEQQLFRFLSRTMPKQKHYVELKPYDKQKFEGGEALIKVLGNVANSGQCKKGLGKSNISIYKVRTDVLGNQHIIKNEGDKPKLDF

SEQ ID NO: 46 - protein, 1388 aa, Streptococcus thermophilus
MTKPYSIGLDIGTNSVGWAVTTDNYKVPSKKMKVLGNTSKKYIKKNLLGVLLFDSGITAEGRRLKRTARRRYTRRRNRILYLQEIFSTEMATLDDAFFQRLDDSFLVPDDKRDSKYPIFGNLVEEKAYHDEFPTIYHLRKYLADSTKKADLRLVYLALAHMIKYRGHFLIEGEFNSKNNDIQKNFQDFLDTYNAIFESDLSLENSKQLEEIVKDKISKLEKKDRILKLFPGEKNSGIFSEFLKLIVGNQADFRKCFNLDEKASLHFSKESYDEDLETLLGYIGDDYSDVFLKAKKLYDAILLSGFLTVTDNETEAPLSSAMIKRYNEHKEDLALLKEYIRNISLKTYNEVFKDDTKNGYAGYIDGKTNQEDFYVYLKKLLAEFEGADYFLEKIDREDFLRKQRTFDNGSIPYQIHLQEMRAILDKQAKFYPFLAKNKERIEKILTFRIPYYVGPLARGNSDFAWSIRKRNEKITPWNFEDVIDKESSAEAFINRMTSFDLYLPEEKVLPKHSLLYETFNVYNELTKVRFIAESMRDYQFLDSKQKKDIVRLYFKDKRKVTDKDIIEYLHAIYGYDGIELKGIEKQFNSSLSTYHDLLNIINDKEFLDDSSNEAIIEEIIHTLTIFEDREMIKQRLSKFENIFDKSVLKKLSRRHYTGWGKLSAKLINGIRDEKSGNTILDYLIDDGISNRNFMQLIHDDALSFKKKIQKAQIIGDEDKGNIKEVVKSLPGSPAIKKGILQSIKIVDELVKVMGGRKPESIVVEMARENQYTNQGKSNSQQRLKRLEKSLKELGSKILKENIPAKLSKIDNNALQNDRLYLYYLQNGKDMYTGDDLDIDRLSNYDIDHIIPQAFLKDNSIDNKVLVSSASNRGKSDDVPSLEVVKKRKTFWYQLLKSKLISQRKFDNLTKAERGGLSPEDKAGFIQRQLVETRQITKHVARLLDEKFNNKKDENNRAVRTVKIITLKSTLVSQFRKDFELYKVREINDFHHAHDAYLNAVVASALLKKYPKLEPEFVYGDYPKYNSFRERKSATEKVYFYSNIMNIFKKSISLADGRVIERPLIEVNEETGESVWNKESDLATVRRVLSYPQVNVVKKVEEQNHGLDRGKPKGLFNANLSSKPKPNSNENLVGAKEYLDPKKYGGYAGISNSFTVLVKGTIEKGAKKKITNVLEFQGISILDRINYRKDKLNFLLEKGYKDIELIIELPKYSLFELSDGSRRMLASILSTNNKRGEIHKGNQIFLSQKFVKLLYHAKRISNTINENHRKYVENHKKEFEELFYYILEFNENYVGAKKNGKLLNSAFQSWQNHSIDELCSSFIGPTGSERKGLFELTSRGSAADFEFLGVKIPRYRDYTPSSLLKDATLIHQSVTGLYETRIDLAKLGEG

SEQ ID NO: 47 - protein, 1138 aa, Acidothermus cellulolyticus
MGGSEVGTVPVTWRLGVDVGERSIGLAAVSYEEDKPKEILAAVSWIHDGGVGDERSGASRLALRGMARRARRLRRFRRARLRDLDMLLSELGWTPLPDKNVSPVDAWLARKRLAEEYVVDETERRRLLGYAVSHMARHRGWRNPWTTIKDLKNLPQPSDSWERTRESLEARYSVSLEPGTVGQWAGYLLQRAPGIRLNPTQQSAGRRAELSNATAFETRLRQEDVLWELRCIADVQGLPEDVVSNVIDAVFCQKRPSVPAERIGRDPLDPSQLRASRACLEFQEYRIVAAVANLRIRDGSGSRPLSLEERNAVIEALLAQTERSLTWSDIALEILKLPNESDLTSVPEEDGPSSLAYSQFAPFDETSARIAEFIAKNRRKIPTFAQWWQEQDRTSRSDLVAALADNSIAGEEEQELLVHLPDAELEALEGLALPSGRVAYSRLTLSGLTRVMRDDGVDVHNARKTCFGVDDNWRPPLPALHEATGHPVVDRNLAILRKFLSSATMRWGPPQSIVVELARGASESRERQAEEEAARRAHRKANDRIRAELRASGLSDPSPADLVRARLLELYDCHCMYCGAPISWENSELDHIVPRTDGGSNRHENLAITCGACNKEKGRRPFASWAETSNRVQLRDVIDRVQKLKYSGNMYWTRDEFSRYKKSVVARLKRRTSDPEVIQSIESTGYAAVALRDRLLSYGEKNGVAQVAVFRGGVTAEARRWLDISIERLFSRVAIFAQSTSTKRLDRRHHAVDAVVLTTLTPGVAKTLADARSRRVSAEFWRRPSDVNRHSTEEPQSPAYRQWKESCSGLGDLLISTAARDSIAVAAPLRLRPTGALHEETLRAFSEHTVGAAWKGAELRRIVEPEVYAAFLALTDPGGRFLKVSPSEDVLPADENRHIVLSDRVLGPRDRVKLFPDDRGSIRVRGGAAYIASFHHARVFRWGSSHSPSFALLRVSLADLAVAGLLRDGVDVFTAELPPWTPAWRYASIALVKAVESGDAKQVGWLVPGDELDFGPEGVTTAAGDLSMFLKYFPERHWVVTGFEDDKRINLKPAFLSAEQAEVLRTERSDRPDTLTEAGEILAQFFPRCWRATVAKVLCHPGLTVIRRTALGQPRWRRGHLPYSWRPWSADPWSGGTP

SEQ ID NO: 48 - protein, 1629 aa, Francisella novicida
MNFKILPIAIDLGVKNTGVFSAFYQKGTSLERLDNKNGKVYELSKDSYTLLMNNRTARRHQRRGIDRKQLVKRLFKLIWTEQLNLEWDKDTQQAISFLFNRRGFSFITDGYSPEYLNIVPEQVKAILMDIFDDYNGEDDLDSYLKLATEQESKISEIYNKLMQKILEFKLMKLCTDIKDDKVSTKTLKEITSYEFELLADYLANYSESLKTQKFSYTDKQGNLKELSYYHHDKYNIQEFLKRHATINDRILDTLLTDDLDIWNFNFEKFDFDKNEEKLQNQEDKDHIQAHLHHFVFAVNKIKSEMASGGRHRSQYFQEITNVLDENNHQEGYLKNFCENLHNKKYSNLSVKNLVNLIGNLSNLELKPLRKYFNDKIHAKADHWDEQKFTETYCHWILGEWRVGVKDQDKKDGAKYSYKDLCNELKQKVTKAGLVDFLLELDPCRTIPPYLDNNNRKPPKCQSLILNPKFLDNQYPNWQQYLQELKKLQSIQNYLDSFETDLKVLKSSKDQPYFVEYKSSNQQIASGQRDYKDLDARILQFIFDRVKASDELLLNEIYFQAKKLKQKASSELEKLESSKKLDEVIANSQLSQILKSQHTNGIFEQGTFLHLVCKYYKQRQRARDSRLYIMPEYRYDKKLHKYNNTGRFDDDNQLLTYCNHKPRQKRYQLLNDLAGVLQVSPNFLKDKIGSDDDLFISKWLVEHIRGFKKACEDSLKIQKDNRGLLNHKINIARNTKGKCEKEIFNLICKIEGSEDKKGNYKHGLAYELGVLLFGEPNEASKPEFDRKIKKFNSIYSFAQIQQIAFAERKGNANTCAVCSADNAHRMQQIKITEPVEDNKDKIILSAKAQRLPAIPTRIVDGAVKKMATILAKNIVDDNWQNIKQVLSAKHQLHIPIITESNAFEFEPALADVKGKSLKDRRKKALERISPENIFKDKNNRIKEFAKGISAYSGANLTDGDFDGAKEELDHIIPRSHKKYGTLNDEANLICVTRGDNKNKGNRIFCLRDLADNYKLKQFETTDDLEIEKKIADTIWDANKKDFKFGNYRSFINLTPQEQKAFRHALFLADENPIKQAVIRAINNRNRTFVNGTQRYFAEVLANNIYLRAKKENLNTDKISFDYFGIPTIGNGRGIAEIRQLYEKVDSDIQAYAKGDKPQASYSHLIDAMLAFCIAADEHRNDGSIGLEIDKNYSLYPLDKNTGEVFTKDIFSQIKITDNEFSDKKLVRKKAIEGFNTHRQMTRDGIYAENYLPILIHKELNEVRKGYTWKNSEEIKIFKGKKYDIQQLNNLVYCLKFVDKPISIDIQISTLEELRNILTTNNIAATAEYYYINLKTQKLHEYYIENYNTALGYKKYSKEMEFLRSLAYRSERVKIKSIDDVKQVLDKDSNFIIGKITLPFKKEWQRLYREWQNTTIKDDYEFLKSFFNVKSITKLHKKVRKDFSLPISTNEGKFLVKRKTWDNNFIYQILNDSDSRADGTKPFIPAFDISKNEIVEAIIDSFTSKNIFWLPKNIELQKVDNKNIFAIDTSKWFEVETPSDLRDIGIATIQYKIDNNSRPKVRVKLDYVIDDDSKINYFMNHSLLKSRYPDKVLEILKQSTIIEFESSGFNKTIKEMLGMKLAGIYNETSNN

SEQ ID NO: 49 - protein, 1068 aa, Verminephrobacter eiseniae
MNKAVAYRLALDLGSTSLGWAIFRLNEAREPTAIIRAGVRIFSDGRNANSEPLAVHRRVARAMRRRRDRLLKRKKRMHDQLVQHGFFPAEVAERKELERLNPYQLRAKGLHEALTPGEFARALFHINQRRGFKSNRKTDRKDNDSGALKQAISELRKRIQDSDCATAGEWFWKERMQQKPEGVRGQWVRARYRKTPSTTDEGKKRIGYDLYVDRAMVEQEFDALWAAQAALQPGLFTEAARAELKDTLLYQRDLRPVKPGRCTLLPAEERAPLALPSTQRFRILQEVNNLRLLDEALREVPLNLAQRDAVVSALEGKKELSFAAIRKLLTLSGKFNLEDEKRAELKGNATSVILARKDLFGDAWAGFDAAVQDEIVWRLVSQESEGALIAWLQQHTGVDGVCAEAIVNTRLPDGYGRLSRKALERIVPALQREVCTYDKAVQAAGFAHHSDLGFDFDYAEDEVQQVGEHTIASTGEVQAQYAFKQLPYYGKALQRHVAFGSGDAKDHEEKCYGKIANPTVHIGLNQVRTVVNALIRRYGHPTEVVVELARDLKQSREQKQQTQREQADNQKRNEDIRKRIAPILETSPERVRDRDIKKWILWEELNKKDIADRHCPYSGERISATMLLSEAVEIEHILPFSRTLDDSLNNRTVAMRRANRIKGDRTPWEARADFEAQGWRYEAILQRAEGMPPRKRYRFAEDGYQRWLGKDRNFLARALNDTSYLSRLAANYLRLVCPQGVRVIPGQMTDKLRGKFGLNSVLGLDGKKNRNDHRHHAVDACVIGVTDQGLMQRFANASKQARENGLTRLVQDMLLPWWPSYYDHVERAVRHIRVSHRPDHGFEGAMMKGTAHGIREDGIREDGRIKQRPKAKGSADHKTITLIPIDEPRQLARHGVDAEGKPLPYKGYASGSNYCIEITKNGKGKWEGQVISTFDAYRIKAAADAAARAGQVISTVEADSIVRKSGWERLRGAQSQNGQPLVMRLVIGDSVRMEVDGRDEVMRVVKMSGKEMVFAPVREANVDKRNNMPDEQDPFTYTYKRADQLRKAKARQVTISPIGELRDPGFKG

SEQ ID NO: 50 - protein, 1125 aa, Francisella tularensis
MNVKILPIAIDLDVKNTGVFSAFYQKGTSLEKLDNKNGKVYELSKDSYTLLMNNRTARRHQRRGIDRKQLVKRLFKLVWTEQLNLEWDKDTQQAISFLFNRRGFSFITDGYSTEYLNIVPEQVKAILMDIFDDYNGEDDLDSYLKLATEQESKISEIYNKLMQKILEFKLRKLCTDIKDDKVSTKTLKEITSYEFELLADYLANYSESLKIQKFSYTDKQGNLKELSYYHHDKYNIQEFLKRHATINDEILDTLLTDDFDIWNFNFEKFDFDKNEEKLQNQEDKDHTQAHLHHFVFAVNKIKSEMASGGRHRSQYFQEITNVLDENNHQEGYLKNFCENLHNKKYSNLSVKNLVNLVGNLSNLELKPLRKYFNDKIHAKADHWDEQKFTETYCHWILGEWRVGVKDQDKKDGAKYSYKDLCNELKQKVTKAGLIDFLLELDPCRTIPPYLDNNNRKPPKCQSLILNPKFLDNQYPNWQQYLQELKKLQSIQDYLDSFETDLKDLKSSKDQPYFVEYKSSNQQMASGQRDYKDLDARILQFIFDRVKASDELLLNEIYFQAKKLKQKASSELEKLESSKKLDEVIANSQLSQILKSQHTNGIFEQGTFLHLVCKYYKQRQRARDSRLYIMPEYRYDKKLDKYNNTGRFDDNNQLLTYCNHKPRQKRYQLLNDLAGVLQVSRNQLLSSVEEWFQQAQRVGEISKSQDEQIFEWLKSFKIASYCKAAVEMQKQYRGTLKNAIQTAIFRQSENINKNKNKNTGNQQQALSENSKDVKSLTADEKKLLKLIENIAKASQKIGESLGLNDKQIKKFNSIYSFAQIQQIAFAERKGNANTCAVCSADNAHRMQQIKITELVEDNKDNIILSAKAQRLPAIPTRIVDGAVKKMATILAKNIVDDNWQNIKQVLSAKHQLHIPIITESNAFEFEPALADVKGKSLKDRRKKALERISPENIFKDKNNRIKEFAKGISAYSGANLTDGDFDGAKEELDHIIPRSHKKYGTLNDEANLICVTRDDNKNIFAIDTSKWFEIETPSDLRDIGVATIQYKIDNNSRPKVRVKLDYVIDDDSKINYFMNHSLLKSRYPDKVLEILKQSTIIEFESSGFNKTIKEMLGMTLAGIYNETSNN

SEQ ID NO: 51 - protein, 1064 aa, Bradyrhizobium sp.
MKRTSLRAYRLGVDLGANSLGWFVVWLDDHGQPEGLGPGGVRIFPDGRNPQSKQSNAAGRRLARSARRRRDRYLQRRGKLMGLLVKHGLMPADEPARKRLECLDPYGLRAKALDEVLPLHHVGRALFHLNQRRGLFANRAIEQGDKDASAIKAAAGRLQTSMQACGARTLGEFLNRRHQLRATVRARSPVGGDVQARYEFYPTRAMVDAEFEAIWAAQAPHHPTMTAEAHDTIREAIFSQRAMKRPSIGKCSLDPATSQDDVDGFRCAWSHPLAQRFRIWQDVRNLAVVETGPTSSRLGKEDQDKVARALLQTDQLSFDEIRGLLGLPSDARFNLESDRRDHLKGDATGAILSARRHFGPAWHDRSLDRQIDIVALLESALDEAAIIASLGTTHSLDEAAAQRALSALLPDGYCRLGLRAIKRVLPLMEAGRTYAEAASAAGYDHALLPGGKLSPTGYLPYYGQWLQNDVVGSDDERDTNERRWGRLPNPTVHIGIGQLRRVVNELIRWHGPPAEITVELTRDLKLSPRRLAELEREQAENQRKNDKRTSLLRKLGLPASTHNLLKLRLWDEQGDVASECPYTGEAIGLERLVSDDVDIDHLIPFSISWDDSAANKVVCMRYANREKGNRTPFEAFGHRQGRPYDWADIAERAARLPRGKRWRFGPGARAQFEELGDFQARLLNETSWLARVAKQYLAAVTHPHRIHVLPGRLTALLRATWELNDLLPGSDDRAAKSRKDHRHHAIDALVAALTDQALLRRMANAHDDTRRKIEVLLPWPTFRIDLETRLKAMLVSHKPDHGLQARLHEDTAYGTVEHPETEDGANLVYRKTFVDISEKEIDRIRDRRLRDLVRAHVAGERQQGKTLKAAVLSFAQRRDIAGHPNGIRHVRLTKSIKPDYLVPIRDKAGRIYKSYNAGENAFVDILQAESGRWIARATTVFQANQANESHDAPAAQPIMRVFKGDMLRIDHAGAEKFVKIVRLSPSNNLLYLVEHHQAGVFQTRHDDPEDSFRWLFASFDKLREWNAELVRIDTLGQPWRRKRGLETGSEDATRIGWTRPKKWP

SEQ ID NO: 52 - protein, 1354 aa, Flavobacterium psychrophilum
MKKILGLDLGTNSIGWAFINEAENEIEVSSIVNTGVRIVPLTTDEESDFKKGNTISINADRTLKRGARRGLQRFKQRREALLETFNRIKFIATDFVYAETGAATTFSSYQLRAKSAVEAVTKEELVKVLLMLNKKRGYKSSRKAKTAEEGDAIDGMKIAKEIFENNLTPGQWVYNSLSKGGKFIPDFYHSDLQKELEKIVRFQNQFHSEQINDKLLADIQGKSRTQTSQHFSKTLNIPLAENKGTREETKLQHYQWRNEALANELDMKILAFIITEINNQINQSSGYLGAISDRSKELYFNQETVGQYQYKQLQENVHAKLKNQVFYRQDYLDEFEKIWETQAKFHSELNEKLKAEIRDITIFYQRKLKSQKHLVSFCEFEKGHKAIPKSSPLFQEFRIWQNLNNVVVKNETTKEVFELSEELKQLIAEELQFKESMTDVQMLTFCELKKGTHTVNFKKIEGNRTNTSIYKAFEKILEVEGYEIDFSKMKPLEIKETVAPIFETLNINTVILDFDPTIQGNDFDKQPYYQLWHLLYSAEDDDKLKETLKTKFGFKENHLPFILNINLQADYGSLSAKAIKKILPHLMDGHIYDKACLMVGYNHSSSLTTAQNNDRVLKDTLELLKKNSLRNPVVEKILNQMINVINAIMKDPAMGKPDEIRVELARELKANNEQRKKATSDINTATTEHERIRKLLHSEFNIPRVTRNDIIRYKLWLETGGISLYTGNPIKASDLFSKNYDIEHIIPKSRLFDDSFSNKTLCERQLNIDKSNKTAYSFLQEKLSENDFAAYENRVKDLFKTGKIKSYTKYKKLLMADNEIPEGFIDRQLRETQYIAKKAKEILLEVSRNVTATIGSVTDKLRQDWELVDVMKELNWEKYDKLGLTHIEEGKNGERLSKIKDWTKRNDHRHHAMDAITVAFTKPAYIQYLNNLNAKTQGENKANSIIGIENKHLYRDKNNKLRFISPMKNFREEAKKQLESILISYKAKNKVVTKNKNTTKKSGGTNQKIQLTPRGRLHKETVYGKLQQYATKEEKVNASFTEDYIQKVAKKEYREALLKRLEENDNDPKKAFTGKNALNKTPIYISLKDNIIVPEKVKTVWLETDYTIRKDITPDLKIDKVIDVGIKRILQNRLNEFNGDPKKAFVNLGESPIWLNKEKGIAIKRVTISGVSNAQALHTKKDHLGNEILDKNGNPIPVDFISTGNNHHVAIYRDEKGNLQEEVVSFYDAVIRRNLGLSVINKNHEKGWEFLFSMKQNEFFIFPSDGFNPHEIDLLNPNNYHLISPNIFRVQKISTKNYMFNHHLETKAVDGEMLKSKKELSKTSYHFIQTPTNLNGIIKVRINHLGKIVHLGEY

SEQ ID NO: 53 - protein, 1062 aa, Actinobacillus succinogenes
MNLNYILGLDLGIASVGWAVVEIDEQENPQRLIDVGVRTFDRAEVLKTGESLALARRLARSSRRLVKRRAERIKKAKRLLKAENLLLSADEILPNEAWQLRVKGLDQKLERQEWAAVLLHLLKHRGYLSQRKNESKSENKELGALLSGVAINHQILQSAEYRTPAEIAVNKFQAEEGHIRNQRGAYTHTFSRLDLLAEMELLFQRQATLGNPHTSTKLLENLTALLMWQKPALAGEAILKMLGKCTFEPTEYKAAKNSYSAERFVWLTKLNNLRILEQGAERALTDNERFALLDQPYEKAKLTYAQVRTLLGLSDEAIFKGLRYQGEDKKAVETKTTLMEVKAYHQIRKALEGLDLKAEWNELKNNPALLDEIGTAFSLYKTDDDIHRYLDGKLSESVLNALLENLNFDKFIQLSLKALQQILPLMLQGQRYDEAVSAIYGDHYGKKSDEIDRLLPNIPTDEIRNPVVLRTLTQARKVINAVVRLYGSPARIHIETGREVGKSYQDRKKLEKQQEENRKQRENAVKKFKEYFPNFVGEPKGKDILKMRLYELQQAKCLYSGKSLELYRLLEKGYVEVDHALPFSRTWDDSFNNKVLVLANENQNKGNATPYEWLDGKNNSEGWQHFVARVQTSGFSYAKKQRVLIQELDEKSFIERNLNDTRYVARFLCNHIADNMLLTGKGKRKVFASNGQITALLRGCWGLQKVRENNDRHHALDAVVVACSTKSMQDKITKFVKYKEGRLFKDKKDGVYKGERINRETGEIISLHFPTPWKFFKENVEIRIFSENPKLELENRLPDYPQYNHEFVQPLFVSRMPTRKMTGQGHMETVKSAKRLDKGLSVLKVPLTQLKLSDLERMVNREREMALYEALKECLEQFGNDPAKAFAEPFYKKGGALVKAVRVEQTQKSGVLVRNGNGVADNATGSIVRVDVFTKGGKYFLVPIYTWQVAKGILPNKAVIQGKDESEWEEMDENAVFQFSMHKNDLIKVKTKKGEIFGYFNGLDRATGSIEIEEHDLEKSKGKNGSHRGLGVKTAFFLEKYQVDELGKNIRPCRPTKRQHVR

SEQ ID NO: 54 - protein, 1340 aa, Dorea longicatena
MEQEYYLGLDMGTGSVGWAVTDSEYHVLRKHGKALWGVRLFESASTAEERRMFRTSRRRLDRRNWRIEILQEIFAEEISKKDPGFFLRMKESKYYPEDKRDINGNCPELPYALFVDDDFTDKDYHKKFPTIYHLRKMLMNTEETPDIRLVYLAIHHMMKHRGHFLLSGDINEIKEFGTTFSKLLENIKNEELDWNLELGKEEYAVVESILKDNMLNRSTKKTRLIKALKAKSICEKAVLNLLAGGTVKLSDIFGLEELNETERPKISFADNGYDDYIGEVENELGEQFYIIETAKAVYDWAVLVEILGKYTSISEAKVATYEKHKSDLQFLKKIVRKYLTKEEYKDIFVSTSDKLKNYSAYIGMTKINGKKVDLQSKRCSKEEFYDFIKKNVLKKLEGQPEYEYLKEELERETFLPKQVNRDNGVIPYQIHLYELKKILGNLRDKIDLIKENEDKLVQLFEFRIPYYVGPLNKIDDGKEGKFTWAVRKSNEKIYPWNFENVVDIEASAEKFIRRMTNKCTYLMGEDVLPKDSLLYSKYMVLNELNNVKLDGEKLSVELKQRLYTDVFCKYRKVTVKKIKNYLKCEGIISGNVEITGIDGDFKASLTAYHDFKEILTGTELAKKDKENIITNIVLFGDDKKLLKKRLNRLYPQITPNQLKKICALSYTGWGRFSKKFLEEITAPDPETGEVWNIITALWESNNNLMQLLSNEYRFMEEVETYNMGKQTKTLSYETVENMYVSPSVKRQIWQTLKIVKELEKVMKESPKRVFIEMAREKQESKRTESRKKQLIDLYKACKNEEKDWVKELGDQEEQKLRSDKLYLYYTQKGRCMYSGEVIELKDLWDNTKYDIDHIYPQSKTMDDSLNNRVLVKKKYNATKSDKYPLNENIRHERKGFWKSLLDGGFISKEKYERLIRNTELSPEELAGFIERQIVETRQSTKAVAEILKQVFPESEIVYVKAGTVSRFRKDFELLKVREVNDLHHAKDAYLNIVVGNSYYVKFTKNASWFIKENPGRTYNLKKMFTSGWNIERNGEVAWEVGKKGTIVTVKQIMNKNNILVTRQVHEAKGGLFDQQIMKKGKGQIAIKETDERLASIEKYGGYNKAAGAYFMLVESKDKKGKTIRTIEFIPLYLKNKIESDESIALNFLEKGRGLKEPKILLKKIKIDTLFDVDGFKMWLSGRTGDRLLFKCANQLILDEKIIVTMKKIVKFIQRRQENRELKLSDKDGIDNEVLMEIYNTFVDKLENTVYRIRLSEQAKTLIDKQKEFERLSLEDKSSTLFEILHIFQCQSSAANLKMIGGPGKAGILVMNNNISKCNKISIINQSPTGIFENEIDLLKI

SEQ ID NO: 55 - protein, 984 aa, Campylobacter jejuni
MAKILAFDIGISSIGWAFSENDELKDCGVRIFTKAENPKTGESLALPRRIARSARKRLARRKARLNHLKHLIANEFKLNYEDYQSFDEILAKAYKGSLISPYELRFRALNELLSKQDFARVILHIAKRRGYDDIKNNGDEEKGKILKAIKQNEEKLANYQSVGEYLYKEYFQKFKENSKEFINVRNKKESYERCIAQSFLKDELKLIFKKQREFGFSFSKKFEEEVLSVAFYKRALKDFSHLVGNCSFFTDEKRAPKNSPLAFMFVALTRIINLLNNLKNTLYTKDDLNALLNEVLKNGTLTYKQTKKLLGLSDDYEFKGEKGNYFIEFKKYKEFIKALGEHSLSQDDLNEIAKDITLIKDEIKLKKALAKYDLNENQIDNLSKLEFKDHLNISFKALKLITPLMLEGKKYDEACNELTLKVAINEDKKDFLPAFNETYYKDEVTNPVVLRAIKEYRKVLNALLKKYGKVHKINIELAREVGKNHSQRAKIEKEQNENYKAKKDAELECEKLGLKINSKNILKLRLFKEQKEFCVYSGEKIKLSDLQDEKMLEIDHIYPYSRSFDDSYMNKVLVFTKQNQEKLNQTPFEAFGNDSAKWQKIEVLAKNLPTKKQKRILDKNYKDKEQKDFKDRNLNDTRYIARLVLNYTKDYLDFLPLSDDENTKLNDTQKGSKVHVEAKSGMLTSALRHTWGFSTKDRNNHLHHAIDAVIIAYANNSIVKAFSDFKKEQESNTAELYAKKISELDYKNKRKFFEPFSGFRQKVLDKIDEIFVSKPERKKPSGALHEETFRKEEEFYQSYGGKEGVLKALELGKIRKVNGKIVKNGDMFRVDIFKHKKTNKFYAVPIYTMDFALKVLPNKAVARSKKGEIKDWILMDENYEFCFSLYKDSLILIQTKDMQEPEFVYYNAFTSSTVSLIVSKHDNKFETLSKNQKILFKNANEKEVIAKSIGIQNLKVFEKYIVSALGEVTKAEFRQREEFKNELR

SEQ ID NO: 56 - protein, 1037 aa, Parvibaculum lavamentivorans
MERIFGFDIGTTSIGFSVIDYSSTQSAGNIQRLGVRIFPEARDPDGTPLNQQRRQKRMMRRQLRRRRIRRKALNETLHEAGFLPAYGSADWPVVMADEPYELRRRGLEEGLSAYEFGRAIYHLAQHRHFKGRELEESDTPDPDVDDEKEAANERAATLKALKNEQTTLGAWLARRPPSDRKRGIHAHRNVVAEEFERLWEVQSKFHPALKSEEMRARISDTIFAQRPVFWRKNTLGECRFMPGEPLCPKGSWLSQQRRMLEKLNNLAIAGGNARPLDAEERDAILSKLQQQASMSWPGVRSALKALYKQRGEPGAEKSLKFNLELGGESKLLGNALEAKLADMFGPDWPAHPRKQEIRHAVHERLWAADYGETPDKKRVIILSEKDRKAHREAAANSFVADFGITGEQAAQLQALKLPTGWEPYSIPALNLFLAELEKGERFGALVNGPDWEGWRRTNFPHRNQPTGEILDKLPSPASKEERERISQLRNPTVVRTQNELRKVVNNLIGLYGKPDRIRIEVGRDVGKSKREREEIQSGIRRNEKQRKKATEDLIKNGIANPSRDDVEKWILWKEGQERCPYTGDQIGFNALFREGRYEVEHIWPRSRSFDNSPRNKTLCRKDVNIEKGNRMPFEAFGHDEDRWSAIQIRLQGMVSAKGGTGMSPGKVKRFLAKTMPEDFAARQLNDTRYAAKQILAQLKRLWPDMGPEAPVKVEAVTGQVTAQLRKLWTLNNILADDGEKTRADHRHHAIDALTVACTHPGMTNKLSRYWQLRDDPRAEKPALTPPWDTIRADAEKAVSEIVVSHRVRKKVSGPLHKETTYGDTGTDIKTKSGTYRQFVTRKKIESLSKGELDEIRDPRIKEIVAAHVAGRGGDPKKAFPPYPCVSPGGPEIRKVRLTSKQQLNLMAQTGNGYADLGSNHHIAIYRLPDGKADFEIVSLFDASRRLAQRNPIVQRTRADGASFVMSLAAGEAIMIPEGSKKGIWIVQGVWASGQVVLERDTDADHSTTTRPMPNPILKDDAKKVSIDPIGRVRPSND

SEQ ID NO: 57 - protein, 1107 aa, Eubacterium ventriosum
MGYTVGLDIGVASVGVAVLDENDNIVEAVSNIFDEADTSNNKVRRTLREGRRTKRRQKTRIEDFKQLWETSGYIIPHKLHLNIIELRNKGLTELLSLDELYCVLLSMLKHRGISYLEDADDGEKGNAYKKGLAFNEKQLKEKMPCEIQLERMKKYGKYHGEFIIEINDEKEYQSNVFTTKAYKKELEKIFETQRCNGNKINTKFIKKYMEIYERKREYYIGPGNEKSRTDYGIYTTRTDEEGNFIDEKNIFGKLIGKCSVYPEEYRASSASYTAQEFNLLNDLNNLKINNEKLTEFQKKEIVEIIKDASSVNMRKIIKKVIDEDIEQYSGARIDKKGKEIYHTFEIYRKLKKELKTINVDIDSFTREELDKTMDILTLNTERESIVKAFDEQKFVYEENLIKKLIEFRKNNQRLFSGWHSFSYKAMLQLIPVMYKEPKEQMQLLTEMNVFKSKKEKYVNYKYIPENEVVKEIYNPVVVKSIRTTVKILNALIKKYGYPESVVIEMPRDKNSDDEKEKIDMNQKKNQEEYEKILNKIYDEKGIEITNKDYKKQKKLVLKLKLWNEQEGLCLYSGKKIAIEDLLNHPEFFEIDHIIPKSISLDDSRSNKVLVYKTENSIKENDTPYHYLTRINGKWGFDEYKANVLELRRRGKIDDKKVNNLLCMEDITKIDVVKGFINRNLNDTRYASRVVLNEMQSFFESRKYCNTKVKVIRGSLTYQMRQDLHLKKNREESYSHHAVDAMLIAFSQKGYEAYRKIQKDCYDFETGEILDKEKWNKYIDDDEFDDILYKERMNEIRKKIIEAEEKVKYNYKIDKKCNRGLCNQTIYGTREKDGKIHKISSYNIYDDKECNSLKKMINSGKGSDLLMYNNDPKTYRDMLKILETYSSEKNPFVAYNKETGDYFRKYSKNHNGPKVEKVKYYSGQINSCIDISHKYGHAKNSKKVVLVSLNPYRTDVYYDNDTGKYYLVGVKYNHIKCVGNKYVIDSETYNELLRKEGVLNSDENLEDLNSKNITYKFSLYKNDIIQYEKGGEYYTERFLSRIKEQKNLIETKPINKPNFQRKNKKGEWENTRNQIALAKTKYVGKLVTDVLGNCYIVNMEKFSLVVDK

SEQ ID NO: 58 - protein, 1136 aa, Streptococcus gordonii
MNGLVLGLDIGIASVGVGILEKDTGKIIHASSRLFPAATADNNVERRSNRQGRRLNRRKKHRSVRLQDLFEGYGLLTDFSKVSMNLNPYQLRVQGMENQLTNEELFVALKNIVKRRGISYLDDASEDGGTVSSDYGKAVEENRKLLAEKTPGQIQLERFEKYGQLRGDFTVEENGEKHRLINVFSTSAYRKEAERILRKQQEFNSKITDEFIEDYLIILTGKRKYYHGPGNEKSRTDYGRFRTDGTTLDNIFGILIGKCTFYTEEYRASKASYTAQEFNLLNDLNNLTVPTETKKLSEEQKKLIIEYAKSAKTLGASTLLKYIAKMIDASVDQIRGYRVDVNNKPEMHTFEVYRKMQSLETIKVEELPRKVLDELAHILTLNTEREGIEEAINSKLKDIFNRDQVLELVQFRKNNSSLFSKGWHNFSIKLMMELIPELYETSEEQMTILTRLGKQRSKETSKRTKYIDEKELTEEIYNPVVAKSVRQAIKIINEATKKYGIFDNIVIEMARENNEEDAKKDYIKRQKANQDEKNAAMEKAAFQYNGKKELPDNIFHGHKELTTKIRLWHQQGEKCLYTGKNIPISDLIHNQYKYEIDHILPLSLSFDDSLSNKVLVLATANQEKGQRTPFQALDSMDDAWSYREFKSYVKDSKLLSNKKKDYLLTEEDISKIEVKQKFIERNLVDTRYSSRVVLNALQDFYKSHQLDTTISVVRGQFTSQLRRKWGIEKSRETYHHHAVDALIIAASSQLRLWKKHSNPLIAYKEGQFVDSETGEIVSLSDEEYKELVFKAPYDHFVDTLRSKKFEDSILFSYQVDSKYNRKISDATIYATRKAKLDKEKKEYTYTLGKIKDIYALGTKTPSKTGFYKFLDLYKTDKSQFLMYQKDRKTWDEVIEKIIEQYRPFKEYDKNGKEVDFNPFEKYRIGNGPIRKYSKKGNGPEIKSLKYYDILLGKHKNITPDGSRNTVALLSLNPWRTDVYYNSETKKYEFLGLKYADLCFEEGGAYGISEVKYKKIREKEGIGKNSEFKFTLYKNDLILIKDTETNCQQFFRFWSRTGKDNPKSFEKHKIELKPYEKAKFEKGEELKVLGKVPPSSNQFQKNMQIENLSIYKVKTDILGNKHFIKKEGDEPKLKFKK

SEQ ID NO: 59 - protein, 984 aa, Campylobacter jejuni
MARILAFDIGISSIGWAFSENDELKDCGVRIFTKAENPKTGESLALPRRLARSARKRLARRKARLNHLKHLIANEFKLNYEDYQSFDESLAKAYKGSLISPYELRFRALNELLSKQDFARVILHIAKRRGYDDIKNNGDEEKSEILKAIKQNEEKLVNYQSVGEYLYKEYFQKFKENSKEFINVRNKKESYERCITQSFLKDELKLIFQKQREFGFSFSKKFEEEVLSVAFYKRALKDFSHLVGNCSFFTDEKRAPKNSPLAFMFVALTRIINILNNLKNTEGILYTKDDLNALLNEVLKNGTLTYKQTKKLLGLSDDYEFKGEKGTYFIEFKKYKEFIKALGEHNLSQDDLNEIAKDITLIKDEIKLKKALAKYDLNQNQIDSLSKLEFKDHLNISFKALKLITPLMLEGKKYDEACNELNLKVAINEDKKDFLPAFNETYYKDEVTNPVVLRAIKEYRKILNALLKKYGKVHKINIELAREVGKNHSQRAKIEKEQNENYKAKKDAEIECEKLGLKINSKNILKLRLFKEQKEFCAYSGEKIKLSDLQDEKMLEIDHIYPYSRSFDDSYMNKVLVFTKQNQEKLNKTPFEAFGNDSTKWQKIEVLAKNLPEKKQKRILDKNYKDKEQKDFKDRNLNDTRYIARLVLNYTKDYLDFLPLSDDENTKLNDTQKGSKVHVEAKSGMLTSALRHTWGFSAKDRNNHLHHAIDAAIIAYANNSIVKAFSDFKKEQESNSVELYAKKISELDYKNKRKFFEPFSGFRQKVLDKIDEIFVSKPERKKPSGALHEETFRKEEEFYQSYGGKEGVLKALELGKIRKVNGKIVKNGDMFRVDIFKHKKTNKFYAVPIYTMDFALKVLPNKAVARSKKGEIKDWILMDENYEFCFSLYKDSLILIQTKDMQEPELVYFNAFTSSTVSLIVSKHDNKFETLSKNQKILFKNANEKEVIAKSIGIQNLKVFEKYIVSALGEVTKAEFRQREDFKK

SEQ ID NO: 60 - protein, 1079 aa, Dinoroseobacter shibae
MRLGLDIGTSSIGWWLYETDGAGSDARITGVVDGGVRIFSDGRDPKSGASLAVDRRAARAMRRRRDRYLRRRATLMKVLAETGLMPADPAEAKALEALDPFALRAAGLDEPLPLPHLGRALFHLNQRRGFKSNRKTDRGDNESGKIKDATARLDMEMMANGARTYGEFLHKRRQKATDPRHVPSVRTRLSIANRGGPDGKEEAGYDFYPDRRHLEEEFHKLWAAQGAHHPELTETLRDLLFEKIFFQRPLKEPEVGLCLFSGHHGVPPKDPRLPKAHPLTQRRVLYETVNQLRVTADGREARPLTREERDQVIHALDNKKPTKSLSSMVLKLPALAKVLKLRDGERFTLETGVRDAIACDPLRASPAHPDRFGPRWSILDADAQWEVISRIRRVQSDAEHAALVDWLTEAHGLDRAHAEATAHAPLPDGYGRLGLTATTRILYQLTADVVTYADAVKACGWHHSDGRTGECFDRLPYYGEVLERHVIPGSYHPDDDDITRFGRITNPTVHIGLNQLRRLVNRIIETHGKPHQIVVELARDLKKSEEQKRADIKRIRDTTEAAKKRSEKLEELEIEDNGRNRMLLRLWEDLNPDDAMRRFCPYTGTRISAAMIFDGSCDVDHILPYSRTLDDSFPNRTLCLREANRQKRNQTPWQAWGDTPHWHAIAANLKNLPENKRWRFAPDAMTRFEGENGFLDRALKDTQYLARISRSYLDTLFTKGGHVWVVPGRFTEMLRRHWGLNSLLSDAGRGAVKAKNRTDHRHHAIDAAVIAATDPGLLNRISRAAGQGEAAGQSAELIARDTPPPWEGFRDDLRVRLDRIIVSHRADHGRIDHAARKQGRDSTAGQLHQETAYSIVDDIHVASRTDLLSLKPAQLLDEPGRSGQVRDPQLRKALRVATGGKTGKDFENALRYFASKPGPYQAIRRVRIIKPLQAQARVPVPAQDPIKAYQGGSNHLFEIWRLPDGEIEAQVITSFEAHTLEGEKRPHPAAKRLLRVHKGDMVALERDGRRVVGHVQKMDIANGLFIVPHNEANADTRNNDKSDPFKWIQIGARPAIASGIRRVSVDEIGRLRDGGTRPI

SEQ ID NO: 61 - protein, 1096 aa, Eubacterium dolichum
MMEVFMGRLVLGLDIGITSVGFGIIDLDESEIVDYGVRLFKEGTAAENETRRTKRGGRRLKRRRVTRREDMLHLLKQAGIISTSFHPLNNPYDVRVKGLNERLNGEELATALLHLCKHRGSSVETIEDDEAKAKEAGETKKVLSMNDQLLKSGKYVCEIQKERLRTNGHIRGHENNFKTRAYVDEAFQILSHQDLSNELKSAIITIISRKRMYYDGPGGPLSPTPYGRYTYFGQKEPIDLIEKMRGKCSLFPNEPRAPKLAYSAELFNLLNDLNNLSIEGEKLTSEQKAMILKIVHEKGKITPKQLAKEVGVSLEQIRGFRIDTKGSPLLSELTGYKMIREVLEKSNDEHLEDHVFYDEIAEILTKTKDIEGRKKQISELSSDLNEESVHQLAGLTKFTAYHSLSFKALRLINEEMLKTELNQMQSITLFGLKQNNELSVKGMKNIQADDTAILSPVAKRAQRETFKVVNRLREIYGEFDSIVVEMAREKNSEEQRKAIRERQKFFEMRNKQVADIIGDDRKINAKLREKLVLYQEQDGKTAYSLEPIDLKLLIDDPNAYEVDHIIPISISLDDSITNKVLVTHRENQEKGNLTPISAFVKGRFTKGSLAQYKAYCLKLKEKNIKTNKGYRKKVEQYLLNENDIYKYDIQKEFINRNLVDTSYASRVVLNTLTTYFKQNEIPTKVFTVKGSLTNAFRRKINLKKDRDEDYGHHAIDALIIASMPKMRLLSTIFSRYKIEDIYDESTGEVFSSGDDSMYYDDRYFAFIASLKAIKVRKFSHKIDTKPNRSVADETIYSTRVIDGKEKVVKKYKDIYDPKFTALAEDILNNAYQEKYLMALHDPQTFDQIVKVVNYYFEEMSKSEKYFTKDKKGRIKISGMNPLSLYRDEHGMLKKYSKKGDGPAITQMKYFDGVLGNHIDISAHYQVRDKKVVLQQISPYRTDFYYSKENGYKFVTIRYKDVRWSEKKKKYVIDQQDYAMKKAEKKIDDTYEFQFSMHRDELIGITKAEGEALIYPDETWHNFNFFFHAGETPEILKFTATNNDKSNKIEVKPIHCYCKMRLMPTISKKIVRIDKYATDVVGNLYKVKKNTLKFEFD

SEQ ID NO: 62 - protein, 1082 aa, Neisseria meningitidis
MAAFKPNPINYILGLDIGIASVGWAMVEIDEDENPICLIDLGVRVFERAEVPKTGDSLAMARRLARSVRRLTRRRAHRLLRARRLLKREGVLQAADFDENGLIKSLPNTPWQLRAAALDRKLTPLEWSAVLLHLIKHRGYLSQRKNEGETADKELGALLKGVADNAHALQTGDFRTPAELALNKFEKESGHIRNQRGDYSHTFSRKDLQAELNLLFEKQKEFGNPHISDGLKEGIETLLMTQRPALSGDAVQKMLGHCTFEPAEPKAAKNTYTAERFIWLTKLNNLRILEQGSERPLTDTERTTLIDEPYRKSKLTYAQARKLLELDNTAFFKGLRYGKDNAEASTLMEMKAYHAISRALEKEGLKDKKSPLNLSPELQDEIGTAFSLFKTDEDITGRLKDRVQPEILEALLKHISFDKFVQISLKALRRIVPLMEQGKRYDEACAEIYGDHYGKKNTEEKIDLPPIPADEIRNPVVLRALSQARKVINGVVRRYGSPARIHIETAREVGKSFKDRKEIEKRQEENRKDREKAATKFREYFPNFVGEPKSKDILKLRLYEQQHGKCLYSGKEINLGRLNEKGYVEIDHALPFSRTWDDSFNNKVLVLGSENQNKGNQTPYEYFNGKDNSREWQEFKARVETSRFPRSKKQRILLQKFDEEGFKERNLNDTRYVNRFLCQFVADHMLLTGKGKRRVFASNGQITNLLRGFWGLRKVRAENDRHHALDAVVVACSTVAMQQKITRFVRYKEMNAFDGKTIDKETGEVLHQKTHFPQPWEFFAQEVMIRVFGKPDGKPEFEEADTPEKLRTLLAEKLSSRPEAVHEYVTPLFVSRAPNRKMSGQGHMETVKSAKRLDEGVSVLRVPLTQLKLKDLEKMVNREREPKLYEALKARLEAHKDDPAKAFAEPFYKYDKAGNRTQQVKAVRVEQVQKTGVWVRNHNGIADNATMVRVDVFEKGDKYYLVPIYSWQVAKGILPDRAVVQGKDEEDWQLIDDSFNFKFSLHPNDLVEVITKKARMFGYFASCHRGTGNINIRIHDLDHKIGKNGILEGIGVKTALSFQKYQIDELGKEIRPCRLKKRPPVR

SEQ ID NO: 63 - protein, 1050 aa, Gluconacetobacter diazotrophicus
MGENMIDESLTFGIDLGIGSCGWAVLRRPSAFGRKGVIEGMGSWCFDVPETSKERTPTNQIRRSNRLLRRVIRRRRNRMAAIRRLLHAAGLLPSTDSDALKRPGHDPWELRARGLDKPLKPVEFAVVLGHIAKRRGFKSAAKRKATNISSDDKKMLTALEATRERLGRYRTVGEMFARDPDFASRRRNREGKYDRTTARDDLEHEVHALFAAQRRLGQGFASPELEEAFTASAFHQRPMQDSERLVGFCPFERTEKRAAKLTPSFERFRLLARLLNLRITTPDGERPLTVDEIALVTRDLGKTAKLSIKRVRTLIGLEDNQRFTTIRPEDEDRDIVARTGGAMTGTATLRKALGEALWTDMQERPEQLDAIVQVLSFFEANETITEKLREIGLTLAVLDVLLTALDAGVFAKFKGAAHISTKAARNLLPHLEQGRRYDEACTMAGYDHAASRLSHHGQIVAKTQFNALVTEIGESIANPIARKALIEGLKQIWAMRNHWGLPGSIHVELARDVGNSIEKRREIEKHIEKNTALRARERREVHDLLDLEDVNGDTLLRYRLWKEQGGKCLYTGKAIHIRQIAATDNSVQVDHILPWSRFGDDSFNNKTLCLASANQQKKRSTPYEWLSGQTGDAWNAFVQRIETNKELRGFKKRNYLLKNAKEAEEKFRSRNLNDTRYAARLFAEAVKLLYAFGERQEKGGNRRVFTRPGALTAALRQAWGVESLKKQDGKRINDDRHHALDALTVAAVDEAEIQRLTKSFHEWEQQGLGRPLRRVEPPWESFRADVEATYPEVFVARPERRRARGEGHAATIRQVKERECTPIVFERKAVSSLKEADLERIKDGERNEAIVEAIRSWIATGRPADAPPRSPRGDIITKIRLATTIKAAVPVRGGTAGRGEMVRADVFSKPNRRGKDEWYLVPVYPHQIMNRKAWPKPPMRSIVANKDEDEWTEVGPEHQFRFSLYPRSNIEIIRPSGEVIEGYFVGLHRNTGALTISAHNDPKSIHSGIGTKTLLAISKYQVDRFGRKSPVRKEVRTWHGEACISPTPPG

SEQ ID NO: 64 - protein, 1391 aa, Kordia algicida
MKKILGLDLGTNSIGWALVNEAEHEHEQSSIVKLGVRVNPLSVDEKTNFEKGRPLSINADRTSKRSARRNLQRFKLRRKNLINLLLKHHIISNETILTEVGKNTTHQTLKLRSKATQEKISLEEFARILLSINKKRGYKSSRKEKNEDEGFTIDGMAIAKELYDNQLTPGQYVYNILQDGKNYIPDFYRSDLQAEFDDVWQFQKKFYSSILTDEFYLKLKGQGKENTRKLFLAIHQVYTAENKGKRDAVKLQYYKWRSEAVKKQLSIEEVAYVLVEINNNINKSSGYLGAISDRSKALYFNNETVGEYLYGQLVKNRHNSLRNQVFYRQDYLDEFEKIWETQAKFYDELTNELKQEIRDVVIFYQRKLKSQKHLISDCLFEKHHKAIPKSSPLFQEFKIWQNLNYLEFVHTQSKEKIFFSELDDETRQFVFAELNIRGTLKIKEIKKLIGLETPVYWKSNFDEIEGNRTNQVLYNVYQNIADDLGYGFDWSKKHAFEINAELQAIFKDVGIDTAILNFDASIEENDFDKQKSYQLWHLLYSAEDTDKATEEDKLIYGNINTKLKKQLHQKYGFEAKYGNLLANISLQQDYGNLSAKAIKKILPYLESGNSFYEACTIVGYNPSNSLTKEQQQNRKLKDKLELLPKNSLRNPVVEKILNQKVNLINQLIDEYGKPDEVRIELARELKKSAKQRADLSKHINDATLKNQNIRKTLQKDFGIQNPSKNDVIRYKLYDELKDNGYKTLFTNKYIPKEQLFSKDVDIEHIIPKAILFDDSFSNKTLAYRNVNLAKADATAFDFISSKHLDDLDNYKARVETLFQSKRISKGKYKKLLMTRQNLPEDFIERDLRNSQYIAKKATAMLKEVFRSVVPTSGRITDKLREDWDLVNVMKELNLPKYRTLGLTEFIERKNGNKIEQIIDWTKRNDHRHHAMDALTVAFTTHNHIQYLNNLNVTHGLNGVDTDHEKSRLYAIKQAITKVYIVGKTKKRKFIPPMENFRSHAKNHLEGILISFKNKNKVVTKNKNRTKTKTKGVFNEKIQLTPRGQLHKETIYGHAKKVIVTKEKVSSKFTHEKILQVTKPAYREALLKRLASFKNDPKKAFSGKNALSKNPLYFDITSGKKVPDTVKLSYFENSYVIRKEVNSDNFKNEKSLQKVLDVGIRRILEKRLADYNGNAKEAFSNLEKNPIWKDKEKGVCIKKVRIEALKNAEPLHVKKDHLGKIILDDENKSTPVDFISTGNNHHVAIYEDKDGKLHDKVVSFYEVVSRVNLGLPIIDKSFNSHLDWKFLFSMKQNEMFVFPSEDFNPKEIDIGNPKNNELISKYLFRVQKFSKVTYGNSAVRDYVFRHHLETELIDKKELKGITYYQLKSIGMLEKLVKVRINHIGKIVHIGEY

SEQ ID NO: 65 - protein, 1116 aa, Clostridium spiroforme
MVEFLLKEMKIMGRLVLGLDIGITSVGYGVIDIDKNEFVDYGVRLFKEGTAINNEERRSKRGARRLKRRKTNRIADMKKLLERNGLIDEQYTALNNPYEIRKKGLKNKLSNYELATAILHITKNRGTCLESNADETQDEESTKNILSKNALELKDKYICEIQLARLEESGKIRGINNNFKTEDYLKELSKILENQDLEKETIDKIKEIVARRRRYDQGPGSEKSPTPYGSYRMENGELVHVNLIDMMRGKCSVFPDQLRAPQQSYSAELFNLLNDLNNLKINGEKLSSTEKQKIIDFVNEKGGITVKQLLKLIDVGITEISGFRIDKNEKPLITEFKGYKKVLKVFKNYNQESLLNDKSIVDTIMDINTKIKSIDERSDQLKQVLPSLDTSIINDLASIKGVSGYHSLSLKALNLINNEMLKTEMNQMQVLHQLDIFDKNRVSLKGQRQIYADDNAILSPVAKRAHRETFKVINKLRSIYGEFDSIVIETTRDKNTQDQKKRIKNNQKNYEERNTEVNNFLKEAGYNPENINAKTKMKIRLYIEQDAKSAYTLQDINLKELIEDEKAYEIDHIIPISISLDDSFNNKVLTTHDENQEKGNLTPISAFLKGKFHNGNLNTYKVFIQNNKNLNRKKKEYLLCEDDITRYEVVQNFINRNLVDTSYACRTVMNTLVHYFKDNEINTKVHTIKGQATSTFRKRIGLIKDREEDYFHHAIDALIVASLKKMNLINSYLMKVDFNEMYDEETGEIFNVLPDNSYLDEKYISFVSNLKNIYEESNKYIRGVMIKEKMTYPLIKVSHKIDTKPNRKISDDTIYSTRNVDNQDMLVERIKNIYDPKENAANTLINDIINDNTDKYIMYHKDPQTFDKIKAIVLNHFNEFKTDKNCYIVTKEGLYKLKGTSPLALYYEEFGPITKYAKKNNGPTIHSMKFYSEKLGNHLSITHKYSTVNKKVITKQISPYRTDFYQSPEGKYKFVTVRYKDVAYNAKKDKYIIDHSWYREQKKLKKIADEWIFVCSVHRDELIGIMKADGQKRIFDSSTESDGETLYHDAKTYEILKFTATNNDITGRFEVKPIYCYCKKQLMVSIGTCRKIQKFATDVLGNLYIVKDNVLKLEFK

SEQ ID NO: 66 - protein, 1348 aa, Finegoldia magna
MKSEKKYYIGLDVGTNSVGWAVTDEFYNILRAKGKDLWGVRLFEKADTAANTRIFRSGRRRNDRKGMRLQILREIFEDEIKKVDKDFYDRLDESKFWAEDKKVSGKYSLFNDKNFSDKQYFEKFPTIFHLRKYLMEEHGKVDIRYYFLAINQMMKRRGHFLIDGQISHVTDDKPLKEQLILLINDLLKIELEEELMDSIFEILADVNEKRTDKKNNLKELIKGQDFNKQEGNILNSIFESIVTGKAKIKNIISDEDILEKIKEDNKEDFVLTGDSYEENLQYFEEVLQENITLFNTLKSTYDFLILQSILKGKSTLSDAQVERYDEHKKDLEILKKVIKKYDEDGKLFKQVFKEDNGNGYVSYIGYYLNKNKKITAKKKISNIEFTKYVKGILEKQCDCEDEDVKYLLGKIEQENFLLKQISSINSVIPHQIHLFELDKILENLAKNYPSFNNKKEEFTKIEKIRKTFTFRIPYYVGPLNDYHKNNGGNAWIFRNKGEKIRPWNFEKIVDLHKSEEEFIKRMLNQCTYLPEETVLPKSSILYSEYMVLNELNNLRINGKPLDTDVKLKLIEELFKKKTKVTLKSIRDYMVRNNFADKEDFDNSEKNLEIASNMKSYIDFNNILEDKFDVEMVEDLIEKITIHTGNKKLLKKYIEETYPDLSSSQIQKIINLKYKDWGRLSRKLLDGIKGTKKETEKTDTVINFLRNSSDNLMQIIGSQNYSFNEYIDKLRKKYIPQEISYEVVENLYVSPSVKKMIWQVIRVTEEITKVMGYDPDKIFIEMAKSEEEKKTTISRKNKLLDLYKAIKKDERDSQYEKLLTGLNKLDDSDLRSRKLYLYYTQMGRDMYTGEKIDLDKLFDSTHYDKDHIIPQSMKKDDSIINNLVLVNKNANQTTKGNIYPVPSSIRNNPKIYNYWKYLMEKEFISKEKYNRLIRNTPLTNEELGGFINRQLVETRQSTKAIKELFEKFYQKSKIIPVKASLASDLRKDMNTLKSREVNDLHHAHDAFLNIVAGDVWNREFTSNPINYVKENREGDKVKYSLSKDFTRPRKSKGKVIWTPEKGRKLIVDTLNKPSVLISNESHVKKGELFNATIAGKKDYKKGKIYLPLKKDDRLQDVSKYGGYKAINGAFFFLVEHTKSKKRIRSIELFPLHLLSKFYEDKNTVLDYAINVLQLQDPKIIIDKINYRTEIIIDNFSYLISTKSNDGSITVKPNEQMYWRVDEISNLKKIENKYKKDAILTEEDRKIMESYIDKIYQQFKAGKYKNRRTTDTIIEKYEIIDLDTLDNKQLYQLLVAFISLSYKTSNNAVDFTVIGLGTECGKPRITNLPDNTYLVYKSITGIYEKRIRIK

SEQ ID NO: 67 - protein, 1129 aa, Streptococcus infantarius
MSNGKILGLDIGVASVGVGIIDSKTGNVIHANSRLFSAANAENNAERRGFRGARRLTRRKKHRVKRVRDLFEKYDISTDFRNLNLNPYELRVKGLTEQLTNEELFAALRTIAKRRGISYLDDAEDDSTGSSDYAKSIDENRRLLKTKTPGQIQLERLEKYGQLRGNFTVYDENGEAHRLINVFSTSDYKNEARKILETQSNYNKQITDEFIEDYIEILTQKRKYYHGPGNEKSRTDYGRFRTDGTTLENIFGILIGKCSFYPEEYRASKASYTAQEFNFLNDLNNLKVPTETGKLSTEQKEYLVDFAKKSKALGASKLLKEIAKIVDCSVDDIKGYRVDNKDKPDLHTFEPYRKLKFNLSSIDIDELSRETLDKLADILTLNTEREGIEDAIKRNLPSQFTEEQISEIVQIRKNQSSAFNKGWHSFSAKLMNELIPELYVTSEEQMTILTRLEKFKVNKKSSKNTKTIDEKEITDEIYNPVVAKSVRQTIKIINAAVKKYGDFDKIVIEMPRDKNAEDEKKFIDKKQKENKKEKDDSLKRAAFLYNGTDNLPDGVFHGNKELKTKIRLWYQQGERCLYSGKLISIHDLVHNSNKFEIDHILPLSLSFDDSLANKVLVYAWTNQEKGQKTPYQVIDSMDTAWSFREMKDYVLKQKGLGKKKCEYLLTTENIDKIEVKKKFIERNLVDTRYASRVVLNSLQTALKELGKDTKVSVVRGQFTSQLRRKWNIDKSRETYHHHAVDALIIAASSQLKLWQKQENPMFESYGENQVVNKETGEILSISDDKYKELVFQPPYQGFVNTISSKGFEDEILFSYQVDSKFNRKVSDATIYSTRKAKLGKDKKDETYVLGKIKDIYSQDGFDTFIKRYKKDKTQFLMYQKDPLTWENVIEVILRDYPSEKLSEDGKKTVKCNPFEEYRRENGLICKYSKKGNGTPIKSLKYYDKKLGNCIDITPEKSKNRVVLRQISPWRADIYFNLETLKYELMGLKYSDLSFEKGTGKYHISQEKYDAIREKEGIGKKSEFKFTLYRNDLILIKDTLNNCERMLRFGSKNDTSKHYVELKPLEKGTFDSEEEILPVLGKVAKSGQFIKGLNKPNISIYKVRTDVLGNKFFIKKEGDKPKLDFKNNNK

SEQ ID NO: 68 - protein, 1065 aa, Clostridium perfringens
MNKDINYALGLDIGITSVGWAVINLDLNRIEDLGVRIFNAAENLKDGSSLALPRRLARGRRRLLRRKAYRVERVRKLILKNNILTKEELEGLFKNKEVIDVWEARVKGLDYKLSREEWAKILINFCKRRGFKSNRKNEAKDKEAGQILSSISYNIEKMKETNSRTIGEYIYNEVKNSEDSYAPLRNKFGEYKMCVSRDVIREEIHTLFEKQRELGNNFASDEIEDKYFEIFNSQRPFSNFEDLEKLVGFCTFERKKHKRAPKHCISSEEFTLYEGINKLSIIKDGEKRKLSEEERTLVVNEAFNKKEIKYTTLRKLLGLSEEELFSTLTYSIDKDISKTENTKFVSLKGYHEIKRAIEKGVSKKAWQDIENNRNLLNDIAYVLTLGKTDDEIEKQLRLRNVPEELFESLLDMSFNKFNNLSIYALEKILPFMKEGYQYNEACEKAGYNFKAIYEGVRTKKLPVIEIDEIVNPVVNRALAQTRKVINSVIDKYGSPVRINIELARDLAKNFKDRKLIEKEQKENRANLDKIRENLRELMDKEPTVVEVLKYRLWEQQRGECAYTQSQIPLERLFSPGYCEIDHIIPFSRSFDDSLSNKILVLGSENQRKGNRTPYEYFGEDSERWNSFEIWVKGSYLNYKKKANLLKKKFSEEEQRDWKARNLQDTKYICRYISNFVNNRLEFKESENKQKVITVNGRATAYLRSRWGLNKVREDGDKHHALDAAVVGVTTQGMVQKISKYSKAHELYTVRKNDEFVDVETGECVDVDEYKEIRKDILPRPWRGFSEELKLRLSDNPLEELKKSPIETYNEEFIKENVKPIFVSRVPFRKISGKLFKETIYSERAFKDGYFVSKKSLVDLKRGDLDNFYNYECDKKLYDAISERMKEFNYNGKKAFESPFRKPTKSGKEGPVVRSVKIKSAVPFKDGIPMNEGLVAKEGMVRIDIYEKEGKYFVVPVYRYQLAKGIVPKRAAIAKKDELKWPIMDQTYNFKFSIYKNDLIEVKYDKKGVYFGYYDGFDRNSASLTIEKHDNSERYRSIGLKVGVLEINKYEVDVLGNYHKVKLGGN

SEQ ID NO: 69 - protein, 1195 aa, Elusimicrobium minutum
MQKNINTKQNHIYIKQAQKIKEKLGDKPYRIGLDLGVGSIGFAIVSMEENDGNVLLPKEIIMVGSRIFKASAGAADRKLSRGQRNNHRHTRERMRYLWKVLAEQKLALPVPADLDRKENSSEGETSAKRFLGDVLQKDIYELRVKSLDERLSLQELGYVLYHIAGHRGSSAIRTFENDSEEAQKENTENKKIAGNIKRLMAKKNYRTYGEYLYKEFFENKEKHKREKISNAANNHKFSPTRDLVIKEAEAILKKQAGKDGFHKELTEEYIEKLTKAIGYESEKLIPESGFCPYLKDEKRLPASHKLNEERRLWETLNNARYSDPIVDIVTGEITGYYEKQFTKEQKQKLFDYLLTGSELTPAQTKKLLGLKNTNFEDIILQGRDKKAQKIKGYKLIKLESMPFWARLSEAQQDSFLYDWNSCPDEKLLTEKLSNEYHLTEEEIDNAFNEIVLSSSYAPLGKSAMLIILEKIKNDLSYTEAVEEALKEGKLTKEKQAIKDRLPYYGAVLQESTQKIIAKGFSPQFKDKGYKTPHTNKYELEYGRIANPVVHQTLNELRKLVNEIIDILGKKPCEIGLETARELKKSAEDRSKLSREQNDNESNRNRIYEIYIRPQQQVIITRRENPRNYILKFELLEEQKSQCPFCGGQISPNDIINNQADIEHLFPIAESEDNGRNNLVISHSACNADKAKRSPWAAFASAAKDSKYDYNRILSNVKENIPHKAWRFNQGAFEKFIENKPMAARFKTDNSYISKVAHKYLACLFEKPNIICVKGSLTAQLRMAWGLQGLMIPFAKQLITEKESESFNKDVNSNKKIRLDNRHHALDAIVIAYASRGYGNLLNKMAGKDYKINYSERNWLSKILLPPNNIVWENIDADLESFESSVKTALKNAFISVKHDHSDNGELVKGTMYKIFYSERGYTLTTYKKLSALKLTDPQKKKTPKDFLETALLKFKGRESEMKNEKIKSAIENNKRLFDVIQDNLEKAKKLLEEENEKSKAEGKKEKNINDASIYQKAISLSGDKYVQLSKKEPGKFFAISKPTPTTTGYGYDTGDSLCVDLYYDNKGKLCGEIIRKIDAQQKNPLKYKEQGFTLFERIYGGDILEVDFDIHSDKNSFRNNTGSAPENRVFIKVGTFTEITNNNIQIWFGNIIKSTGGQDDSFTINSMQQYNPRKLILSSCGFIKYRSPILKNKEG

SEQ ID NO: 70 - protein, 1101 aa, Akkermansia muciniphila
MSRSLTFSFDIGYASIGWAVIASASHDDADPSVCGCGTVLFPKDDCQAFKRREYRRLRRNIRSRRVRIERIGRLLVQAQIITPEMKETSGHPAPFYLASEALKGHRTLAPIELWHVLRWYAHNRGYDNNASWSNSLSEDGGNGEDTERVKHAQDLMDKHGTATMAETICRELKLEEGKADAPMEVSTPAYKNLNTAFPRLIVEKEVRRILELSAPLIPGLTAEIIELIAQHHPLTTEQRGVLLQHGIKLARRYRGSLLFGQLIPRFDNRIISRCPVTWAQVYEAELKKGNSEQSARERAEKLSKVPTANCPEFYEYRMARILCNIRADGEPLSAEIRRELMNQARQEGKLTKASLEKAISSRLGKETETNVSNYFTLHPDSEEALYLNPAVEVLQRSGIGQILSPSVYRIAANRLRRGKSVTPNYLLNLLKSRGESGEALEKKIEKESKKKEADYADTPLKPKYATGRAPYARTVLKKVVEEILDGEDPTRPARGEAHPDGELKAHDGCLYCLLDTDSSVNQHQKERRLDTMTNNHLVRHRMLILDRLLKDLIQDFADGQKDRISRVCVEVGKELTTFSAMDSKKIQRELTLRQKSHTDAVNRLKRKLPGKALSANLIRKCRIAMDMNWTCPFTGATYGDHELENLELEHIVPHSFRQSNALSSLVLTWPGVNRMKGQRTGYDFVEQEQENPVPDKPNLHICSLNNYRELVEKLDDKKGHEDDRRRKKKRKALLMVRGLSHKHQSQNHEAMKEIGMTEGMMTQSSHLMKLACKSIKTSLPDAHIDMIPGAVTAEVRKAWDVFGVFKELCPEAADPDSGKILKENLRSLTHLHHALDACVLGLIPYIIPAHHNGLLRRVLAMRRIPEKLIPQVRPVANQRHYVLNDDGRMMLRDLSASLKENIREQLMEQRVIQHVPADMGGALLKETMQRVLSVDGSGEDAMVSLSKKKDGKKEKNQVKASKLVGVFPEGPSKLKALKAAIEIDGNYGVALDPKPVVIRHIKVFKRIMALKEQNGGKPVRILKKGMLIHLTSSKDPKHAGVWRIESIQDSKGGVKLDLQRAHCAVPKNKTHECNWREVDLISLLKKYQMKRYPTSYTGTPR

SEQ ID NO: 71 - protein, 1187 aa, Bifidobacterium longum
MLSRQLLGASHLARPVSYSYNVQDNDVHCSYGERCFMRGKRYRIGIDVGLNSVGLAAVEVSDENSPVRLLNAQSVIHDGGVDPQKNKEAITRKNMSGVARRTRRMRRRKRERLHKLDMLLGKFGYPVIEPESLDKPFEEWHVRAELATRYIEDDELRRESISIALRHMARHRGWRNPYRQVDSLISDNPYSKQYGELKEKAKAYNDDATAAEEESTPAQLVVAMLDAGYAEAPRLRWRTGSKKPDAEGYLPVRLMQEDNANELKQIFRVQRVPADEWKPLFRSVFYAVSPKGSAEQRVGQDPLAPEQARALKASLAFQEYRIANVITNLRIKDASAELRKLTVDEKQSIYDQLVSPSSEDITWSDLCDFLGFKRSQLKGVGSLTEDGEERISSRPPRLTSVQRIYESDNKIRKPLVAWWKSASDNEHEAMIRLLSNTVDIDKVREDVAYASAIEFIDGLDDDALTKLDSVDLPSGRAAYSVETLQKLTRQMLTTDDDLHEARKTLFNVTDSWRPPADPIGEPLGNPSVDRVLKNVNRYLMNCQQRWGNPVSVNIEHVRSSFSSVAFARKDKREYEKNNEKRSIFRSSLSEQLRADEQMEKVRESDLRRLEAIQRQNGQCLYCGRTITFRTCEMDHIVPRKGVGSTNTRTNFAAVCAECNRMKSNTPFAIWARSEDAQTRGVSLAEAKKRVTMFTFNPKSYAPREVKAFKQAVIARLQQTEDDAAIDNRSIESVAWMADELHRRIDWYFNAKQYVNSASIDDAEAETMKTTVSVFQGRVTASARRAAGIEGKIHFIGQQSKTRLDRRHHAVDASVIAMMNTAAAQTLMERESLRESQRLIGLMPGERSWKEYPYEGTSRYESFHLWLDNMDVLLELLNDALDNDRIAVMQSQRYVLGNSIAHDATIHPLEKVPLGSAMSADLIRRASTPALWCALTRLPDYDEKEGLPEDSHREIRVHDTRYSADDEMGFFASQAAQIAVQEGSADIGSAIHHARVYRCWKTNAKGVRKYFYGMIRVFQTDLLRACHDDLFTVPLPPQSISMRYGEPRVVQALQSGNAQYLGSLVVGDEIEMDFSSLDVDGQIGEYLQFFSQFSGGNLAWKHWVVDGFFNQTQLRIRPRYLAAEGLAKAFSDDVVPDGVQKIVTKQGWLPPVNTASKTAVRIVRRNAFGEPRLSSAHHMPCSWQWRHE

SEQ ID NO: 72 - protein, 166 aa, uncultured Termite
MNKVQEIEYKKIREKLADREYRIGLDLGVGSIGYVVVSLKECNDLSYLPEDIILSGSRIFKSSIGAVERREFRLQRNSHRHHRERMRFLWQLLAEKQLALQSSKDLEKKENSADCETSQKRFPINILKEDPYILRYKALEEKLSLFQLGYVLYHIANHSNTAYENT

SEQ ID NO: 73 - protein, 1032 aa, uncultured Termite
MLYHIANHRGTDSVRSFLEYDDDKIKENTLTAKIAKETKKVIDAKKYRTFGEYLYKGKIEKFQQNIRKKVSNRKTPANKNKEFAVTRDVIIKETEKILASQKQYYTYILTDEYIKKIKDAISYQTEKLIPESGYCPYFKDEKRLPRSHKLNEYRRMYEALNNAKYFDPVLDENTGEILSYQEKEFSREEKKILFDEVLLKGMELTESGAKKLLYHLPDGCEVQLQGRDKTTQKIKGYALVDLEASPFWLRLSQQQQDEFLYDWNSLPLEKLKPKLTNYYSLTESEVDETFQEIKLPSNYASVGKKAMEILLTYIKDGCSYTEALEKAVSEGKLKVDKQTMIYDSLPYYGKILKESTQKLIGKAFSKQFADRNYKEPDTNKNEREFGKIANPVVHQTLNELRKLINEIITVFGKKPLEIGLETTRELKKSKKNREYLSKQQNKNEYARNRIYKEYIEPHLSQIKSRQENPSKYISKFELLEEQNFICPFCSEKITPDDIINSKVDVEHIFPIEESEDITKNNLVIAHNECNADKGKKSPFDAFGDKTSGKYRWNCILHNAQKNLPHKVWRFYQGSLEKFLENKPMSRRFGTDNSYISKIAARYLACLFNDPYHSEIFCIKSSLIAQLRIAWDLNSIMVPLVKNILSEKELEEFKISKNKKIRIDNRHHALDAIVIAYANRGYHNFLNRIHAKEYKINYREKSWLSKILLPPLNRDLEDFKISVKDSIEKANVSIKHDHNTNGSLVKATAYKVYYSGAGEYIITTSKNVEEISFKEKEDPKDTLYRALCKFECRDIDIKDEKLIKKLKYNSTLYKKVQNNLSKAKQELEQDNKKTEEEGKKSQKITEVRIYKKACSLVKGQYIQCGSRLKDKFFAVKEPTEIKTGLGYDTGDNLFLDLYYDKTGKLCGEIIRKVNFNRNKPNYQKEGYTLFERIYQSDILEVDTSEDRISLKNKTGSAPSDRTFIKVNTFTEVNAYFDGKRDKIQIFFGNLLKSSFKNDSFFISSMQKYNVRKVILTSLGIIKYRSQILKNKEV

SEQ ID NO: 74 - protein, 1032 aa, uncultured Termite
MKKRILGLDIGIASVGWALVEFDDEFQDNKKKGTIIKSGVRIFTRAETPKERESLAKPRREARSQRRRIRRRVERLNSIRELFVKNGVVEEWSVSKKNPNNIYITLNQIKTPWQLRMESLDRKLTNEQFAVVLTHLAKHRGYKSLRKDDKAGKVLEAISQNKKRLNDSDYRTLGEMFCKNESYKEHKRNKGGEYINSVARELIEEEVEKIFVKQREKGNNFADVNTEREYLKIAFSQKPAGSISKMVGFCTFENGEKRAPRDSYSAELFKVLCTINNTTFTDMKTGEIRSFSKEEIGKTLETVKNVKDVKYAKIRKDLGLEDSVKFSGVDYRENAKSKGEGEIFVSMKTYHEIKSKIEKLSKEKWDNLKGNTELLDSIVNIIANLKDDESIKKEFQKLKIDEDIIDVLLNFEFKKFINLSFKALRKIIPFQFQGQKYITASTSAGYSLKQEGIKNKLVPPAKENINVAVVARAFAQTRKVINAVIRKYGQFDQINIELATELKNSKFDRSKIEEGQKKFQSQKDKIFKEVQELRGGMTPSSSLLLKYRLWREQDERCVYSGRKISFEDLLDTGFLDIDHIIPYSKSMDDSFNNKVLCLAEENRNKKNDIPFNYYQRIDRDWNLLISIITSMKNMKIAKKSRLLKQELSDIEGFIERNINDTRYATRYIKDFLENNLEFKENEFIKVKVQARSGGLTSVLSYNWGMSKDREESYFHHAKDAIIVACSTQGMVQYISKISQQYENDKDKMKKIKDKTENCIPKPWDSFRADVEESIEGIFVSFAPRHKVTGSAHKETIYSKKHLEKERYVTVKKSLDKIKLSDLENIPCNENCGIIRVLKERLEKFKNDSLKAFADPVHMPTKCPNKKGPVIRSVKIKESNKTGIEVRKGLAERGEMVRVDVFIKDKKYYLVPIYVSDFKNKDLPNKAIAALKLENEWIMIDKTYSFKFSLFKDDLIKIKKKKEEIFGYFGGVHRSTGTIKIKSRHKPKEIDEGIGSRCLLDFRKFQVDVLGNYTEVKHEKRMPAYITRKDKKH

SEQ ID NO: 75 - protein, 1361 aa, Lactobacillus casei
MTKLGKPYGIGVDIGSNSIGFAAVDENSHLIRLKGKTVIGARLFEEGKAAADRRASRTTRRRLSRNRWRLSFLRDFFESHITPTGPNFFMRQKYSEISPKDKARYKYEKRLFNDRTDAEFYQQYPTMYHLRNRLLTDPSKADVREIYFAIHHILKSRGHFLTSGYAKDFNTNKVALNEIFPALQDAYAQVYPDLDITFDENKVNEFKTVLLNEKATPSDTQRALVNLLLAEDGDKDILKQQKQVLTEFAKAVVGLKTKLNVALGTEVDSSEATVWNFSLGQLDDKWAGIESAMTDEGTEILDQIRDLYRARLLNGIVPAGKTLSQAKVDDYAQHHEDLELFKDYLKQLEDDGTAKAIRQLYDRYIDGDDAKPFVREDFVKALTKEVTAHPNAKSPELLERLAQPDFMLKQRNKANGAIPVQMQQRELDQIIKNQSVYYDWLAAPNPVEKHRKSMPYQLDELLNFRIPYYVGPLVTAKEQKAAQGGVFAWMVRKDPDGNITPYNFDEKVDREASANTFIQRMKTTDTYLIGEDVLPKQSLLYQRYEVLNELNNVRVNNEKLSIEQKQQVIRELFERHNSVTIKQFAENLRAHGDYAHIPEIRGLADEKRFLSSLSTYRQLKSLLPDAIDDPAKQADIENIIAWSTVFEDAAIFKTKLKEINWLDSQTITKLSNIRYRGWGQFSHKFLNGLTLGNGHTIIQELFLSNNNLMQILTDETLQKKMTELNADKLKAANINDAIDDAYTSPSNKKALRQVLRVIEDIKRAADGQDPSWLYVETADGGGTPGKRTRARQHQLQEIYANAAHELIDSAVRGELEDKIADKADFNDRLVLYFMQGGRDIYTGTPLNIDQLSSYDIDHILPQSLIKDNSLDNRVLVHAIINREKNATFASTIYAQKMNATWRQWHEAGLISGRKLRNLQMRPDQIDKYASGFVARQLVETRQIIKLTEQIVAAQYPETKIIAVKAGLSHQLREELEFPKNRDVNHYHHAFDAFLAARIGTYLLKRFPNLQAFFTYGKFKKADVKKLRGFNFIRDITHAEDKIVVKDTGEVIWDKKRDVDELDRIYNFKRMLITHEVHFEKADLFKQTVYGAKDSKEAGGKKQLISKKKGYPVDIYGGYTQETGSYLSVVRLTKKAMYAVVKVSTRDAAKLAVAKSISEQKENETLNDIIDEKLSKISKNGKITHELFEVVLPRVGQKTLFKNSKYNLFLVNSDTYMHNYQELWMPREYQKMWKDISLSKYGDAQTEDQLDQIFGFIVSQVNSYFNLYDINQFRKKLNDAADKFATLPMRDTDDMQGKIATIGQLLIGLQANAARSDLRNLDIKTPLGLLQIPNGISLDSDTSVVYQSPTGLLEREVHLSDL

SEQ ID NO: 76 - protein, 1348 aa, Streptococcus equi
MKKPYTIALDIGTNSVGWVVVTDDYRVPTKKMKVLGNTERKTIKKNLIGALLFDSGDTAEGTRLKRTARRRYTRRKNRLRYLKEIFTEEMAKVDDGFFQRLEDSFYVLEDKEGNKHPIFANLADEVAYHKKYPTIYHLRKELVDNPQKADLRLIYLAVAHIIKFRGHFLIEGTLSSKNNNLQKSFDHLVDTYNLLFEEQRLLTEGINAKELLSAALSKSKRLENLISLIPGQKKTGIFGNIIALSLGLTPNFKANFGLSKDVKLQLAKDTYADDLDSLLAQIGDQYADLFLAAKNLSDAILLSDILTESDEITRAPLSASMVKRYREHHKDLVTLKTLIKDQLPEKYQEIFLDKTKNGYAGYIEGQVSQEEFYKYLKPILARLDGSEPLLLKIDREDFLRKQRTFDNGSIPHQIHLEELHAILRRQEVFYPFLKDNRKKIESLLTFRIPYYVGPLARGHSRFAWVKRKFDGAIRPWNFEEIVDEEASAQIFIEKMTKNDLYLPNEKVLPKHSLLYETFTVYNELTKVKYATEGMTRPQFLSADQKQAIVDLLFKTNRKVTVKQLKENYFKKIECWDSVEITGVEDSFNASLGTYHDLLKIIQDKDFLDNPDNQKIIEDIILTLTLFEDKKMISKRLDQYAHLFDKVVLNKLERHHYTGWGRLSGKLINGIRDKQSGKTILDFLKADGFANRNFMQLIHDSELSFIDEIAKAQVIGKTEYSKDLVGNLAGSPAIKKGISQTIKIVDELVKIMGYLPQQIVIEMARENQTTAQGIKNARQRMRKLEETAKKLGSNILKEHPVDNSQLQNDKRYLYYLQNGKDMYTGDDLDIDYLSSYDIDHIIPQSFIKNNSIDNKVLTSQGANRGKLDNVPSEAIVRKMKGYWQSLLRAGAISKQKFDNLTKAERGGLTQVDKAGFIQRQLVETRQITKHVAQILDSRFNTEFDDHNKRIRKVHIITLKSKLVSDFRKEFGLYKIRDINHYHHAHDAYLNAVVAKAILGKYPQLAPEFVYGDYPKYNSFKERQKATQKMLFYSNILKFFKDQESLHVNSDGEEIWNANKHLPIIKNVLSIPQVNIVKKTEVQTGGFYKESILSKGNSDKLIPRKNNWDTRKYGGFDSPTVAYSVLVIAKMEKGKAKVLKPVKEMVGITIMERTAFEENPVVFLEARGYREIQEHLIIKLPKYSLFELENGRRRLLASASELQKGNELFLPVDYMTFLYLAAHYHELTGSSEDVLRKKYFVDRHLHYFDDIIQMINDFAERHILASSNLEKINHTYHNNSDLPVNERAENIINVFTFVALGAPAAFKFFDATIDRKRYTSTKEVLNATLIHQSVTGLYETRIDLSQLGEN

SEQ ID NO: 77 - protein, 1341 aa, Ruminococcus lactaris
MGKGYYVGLDMGTGSVGWAVTDESYQILRRHGKAMWGVRLFESAKTAEERRMFRTGRRRLDRRGWRIEILQEIFAEEISRVDPGFFLRMKESKYYPEDKRDIQGNCPELPYTLFVDKTFTDKDFHKKYPTIYHLRKMLMETEDTPDMRLVYLALHHMMKHRGHFLLSGDISQVTEFKNTFNQFIENIRNEEMDFEIELDESAVQMIEETLKDKNLTRSAKKSKLVKGLNAKNVRDKAFLTLLSGGTVKLSDLFGMEELNEGERPKISFADNGYEEYAAVVEMELGELYYIVESAKAVYDWAILSDILGGSTSVSDAKVRAYEKHKADLKYLKAVVKEYFPKEVYNAVFVESSDKLNNYPAYIGMTKKNGKKVSLEGKRCSREEFMDFLKKNIVVKLPDEEAKMYLQSELEKDSFLPKQVNKDNGVIPYQVHKYELKKILDNLGDKIPFLKENAEKIEKLFSFRIPYYVGPLRTGNGENSKFAWAERKSTEKIYPWNFENVIDVEQSAENFIRRMTNKCTYLIGEDVLPKDSLLYSKFMVLNELNNLRLDGQKISVELKQKIYRDVFCRSRKVTQKKLKSYLIREGIAGKNVELTGIDGDFKGSLTAYHDFKEKLIDVELTQKEKEEIILNIVLFGDDKKLLKQRLKKKFPQLTEKQINTVTALSYKGWGRLSKKLLEEVTVPAPETGEVWNIITALWETNDNFMQLLSKEYQFSDRIEEFNEEKADPEVSYQTIEDLYVSPAVKRQIWQTLQIIQEIEKVMGEKPKRVFVEMAREKQENKRTESRKKTLSDLYTKCKKEEPEWIEALCTSLEKHEEHQLRSDKLYLYYTQKGRCMYSGEPIDLEDLWDNTKYDIDHIYPQSKTMDDSLKNRVLVKKEYNAKKSDTYPIAADIQKKMMPFWKSLLTGGFIPKEKYDRLVRNNPLDANELAGFIERQIVETRQSTKAVAEILKKILPDTEIVYVKAKTVSKFRQDFDFIKVRDMNDLHHAKDAYLNIVVGNVYFVKFTKNAAWFVKENPGRTYNLEKMFIWDVARDGEIAWKAGKSGSIVQVRAMMEKNHILVTRRSYEVKGGLFDQQILKKGKGQVPVKESDERLRDIGKYGGYNKAAGVYFMLVSSKDKKGKEQRTIEFVPIYLKDRVEKDMESARNYLMEERGLREPKILIKKIKIDTLFKVDGFYMWLSGRTSNQLIFKGANQLILSKEDMKTLKKVVKYIQRQKEDKNVKISMRDGITEEELLKLYETFLDKIRHSIYGARLSSQEKTLVNGKEKFIDLSVEAKCQVLYEILHLFQCQSGAANLKMIGGPASAGILVMNNNISKCKNISIVNQSPTGIYEKEIDLLRV

SEQ ID NO: 78 - protein, 1003 aa, Gluconacetobacter diazotrophicus
MIDESLTFGIDLGIGSCGWAVLRRPSAFGRKGVIEGMGSWCFDVPETSKERTPTNQIRRSNRLLRRVIRRRRNRMAAIRRLLHAAGLLPSTDSDALKRPGHDPWELRARGLDKPLKPVEFAVVLGHIAKRRGFKSAAKRKATNISSDDKKMLTALEATRERLGRYRTVGEMFARDPDFASRRRNREGKYDRTTARDDLEHEVHALFAAQRRLGQGFASPELEEAFTASAFHQRPMQDSERLVGFCPFERTEKRAAKLTPSFERFRLLARLLNLRITTPDGERPLTVDEIALVTRDLGKTAKLSIKRVRTLIGLEDNQRFTTIRPEDEDRDIVARTGGAMTGTATLRKALGEALWTDMQERPEQLDAIVQVLSFFEANETITEKLREIGLTLAVLDVLLTALDAGVFAKFKGAAHISTKAARNLLPHLEQGRRYDEACTMAGYDHAASRLSHHGQIVAKTQFNALVTEIGESIANPIARKALIEGLKQIWAMRNHWGLPGSIHVELARDVGNSIEKRREIEKHIEKNTALRARERREVHDLLDLEDVNGDTLLRYRLWKEQGGKCLYTGKAIHIRQIAATDNSVQVDHILPWSRFGDDSFNNKTLCLASANQQKKRSTPYEWLSGQTGDAWNAFVQRIETNKELRGFKKRNYLLKNAKEAEEKFRSRNLNDTRYAARLFAEAVKLLYAFGERQEKGGNRRVFTRPGALTAALRQAWGVESLKKQDGKRINDDRHHALDALTVAAVDEAEIQRLTKSFHEWEQQGLGRPLRRVEPPWESFRADVEATYPEVFVARPERRRARGEGHAATIRQVKERECTPIVFERKAVSSLKEADLERIKDGERNEAIVEAIRSWIATGRPADAPPRSPRGDIITKIRLATTIKAAVPVRGGTAGRGEMVRADVFSKPNRRGKDEWYLVPVYPHQIMNRKAWPKPPMRSIVANKDEDEWTEVGPEHQFRFSLYPRSNIEIIRPSGEVIEGYFVGLHRNTGALIPTPVGPDSYVIA

SEQ ID NO: 79 - protein, 1368 aa, Streptococcus pyogenes
MDKKYSIGLDIGTNSVGWAVITDDYKVPSKKFKVLGNTDRHSIKKNLIGALLFDSGETAEATRLKRTARRRYTRRKNRICYLQEIFSNEIAKVDDSFFHRLEESFLVEEDKKHERHPIFGNIVDEVAYHEKYPTIYHLRKKLADSTDKADLRLIYLALAHMIKFRGHFLIEGDLNPDNSDVDKLFIQLVQTYNQLFEENPINASRVDAKAILSARLSKSRRLENLIAQLPGEKRNGLFGNLIALSLGLTPNFKSNFDLAEDAKLQLSKDTYDDDLDNLLAQIGDQYADLFLAAKNLSDAILLSDILRVNTEITKAPLSASMIKRYDEHHQDLTLLKALVRQQLPEKYKEIFFDQSKNGYAGYIDGGASQEEFYKFIKPILEKMDGTEELLAKLNREDLLRKQRTFDNGSIPHQIHLGELHAILRRQEDFYPFLKDNREKIEKILTFRIPYYVGPLARGNSRFAWMTRKSEETITPWNFEEVVDKGASAQSFIERMTNFDKNLPNEKVLPKHSLLYEYFTVYNELTKVKYVTEGMRKPAFLSGEQKKAIVDLLFKTNRKVTVKQLKEDYFKKIECFDSVEISGVEDRFNASLGTYHDLLKIIKDKDFLDNEENEDILEDIVLTLTLFEDREMIEERLKTYAHLFDDKVMKQLKRRRYTGWGRLSRKLINGIRDKQSGKTILDFLKSDGFANRNFMQLIHDDSLTFKEDLQKAQVSGQGDSLHEHIANLAGSPAIKKGILQTVKVVDELVKVMGRHKPENIVIEMARENQTTQKGQKNSRERMKRIEEGIKELGSDILKEYPVETTQLQNEKLYLYYLQNGRDMYVDQELDINRLSDYDVDHIVPQSFLKDDSIDNKVLTRSDKNRGKSDNVPSEEVVKKMKNYWKQLLNAKLITQRKFDNLTKAERGGLSELDKAGFIKRQLVETRQITKHVAQILDSRMNTKYDENDKLIREVRVITLKSKLVSDFRKDFQFYKVREINNYHHAHDAYLNAVVGTALIKKYPKLESEFVYGDYKVYDIRKMIAKSEQEIGKATAKYFFYSNIMNFFKTEITLANGEIRKRPLIETNGETGEIVWDKGRDFATVRKVLSMPQVNIVKKTEVQTGGFSKESILPKRNSDKLIARKKDWDPKKYGGFDSPTVAYSVLVVAKVEKGKSKKLKSVKELVGITIMERSSFEKDPVDFLEAKGYKEVRKDLIIKLPKYSLFELENGRKRMLASAGELQKGNELALPSKYVNFLYLASHYEKLKGSPEDNEQKQLFVEQHKHYLDEIIEQISEFSKRVILADANLDKVLSAYNKHRDKPIREQAENIIHLFTLTNLGAPAAFKCFDTTIGRNRYKSIKEVLDATLIHQSITGLYETRIDLSQLGGD

SEQ ID NO: 80 - protein, 1504 aa, Bacteroides dorei
MKNIVGLDLGTNSIGWAVVNGSVNDDGSEQLVKIQASGSRIIPMDAAMIGDFNKGNSISQTAERTRLRGVRRLSERYLLRRERLHRILDILGFLPFHFAQDLDRHGKIVKGKEPKLAWRKNEAGQFEFIFQDSFKEMLEDFKLNYPNLITDDKKVPYDWTIYYLRKKGLTSKISKEELAWILLNFNQKRGYYQLRGEEEEENKDKLVEFYALKVVAVEDSGEKKGKDIWYNVHLENGWVYRRTSNMSLDWVGKTKEFIVTTDLEKDGTPKKDKEGNVKRSFRAPKEDDWSLVKKKTEADIDQTHKTVGAYIYDTLLGNPSQKIRGRLVRTIERKYYKEELKLILEKQKEFHLELQDRALYAACIEELYPINEAHRNNVGNRDFTYLFLEDILFYQRPLKSKKSLIDNCPYEENQGLDKETGEIKSFPVKCIAKSHPLFQEFRLWQFIINLRIYRKDLAQDVDVTNELLKTEEDYVALFDWLNGKKEIDQKAFLKYPVFGLKKEIENYRWNYVQDKPYPCNETRSLMLARLEKCDISIEFLTKENEEALWHILYSVEDKNEIVKALQKFADKHDLNASFVDVFQKFPPFKKEYGSYSAKAIKKLLPLMRMGKYWSENSIDKGTRERIDKIITGEYDEKIENRVREKAIHLADVSDFKGLPLWLVCYIVYGRHSEAKEIIQWKSPADIDSYLRSFKQHSLRNPIVEQIIIETLRVVRDIWKQVGNIDEIHVELGREMKNPADKRKKMTQQMSENENTNLRIKYLLTEFLNPEYEVENVRPYSPSQQDILRIYEEGVLNSVSDLPEEISDILKKFTETDLKKRPSRSEVLRYKLWLEQKYRSPYTGEVIPLGKLFTPAYEIEHVIPQSYYFDDSFSNKVICEAEVNKLKSNLLGHEFIVKHHGEIVELPFGKKVRIFTVDEYEQFVKDNYSRTRSKMKKLLMDDIPEEFVTRQLNDSRYISKVVKSLLSNIVREKGEEEAISKNVIPCTGGVTDRLKKDWGINEVWNKIILPRFQRLNELTGTNKFTTKNVGIQEIPTMPLELQKGFNKKRIDHRHHAMDAIIIACANRNIINYLNNKSATAKAELSRYDLQKMLCDKAKTDNNGNYKWVIRKPWASFTQDTYLALENIIVSFKQNLRVINKATNRFLHYNEEGKKIFVKQGKGDNWAIRKSMHKDTVFGEVNLRRIKTVALNEAMKNPQSIVVKDFKRKLLELWNLGFDAKRIKKYFEDNRETWSDINLSKIEVYYFSKDTKDRFFATRKPLDTSFDRKKIENNITDTGIQKILLRHLELKDNNPDIAFSPDGIDEMNRNIIQLNNGKYHQPIIKIRWYEQADKFAVGQTGNKSSKFVEAAKGTNLFFAVYESNILDKKTNTIIKKRNYATIPLNVAIERQKQGLPVAPEDENGNDPIFVLSPNDLVYLPTDDELANGIIAQPLDRGRIYKMVSSSGEQCFFIKHIVANVLVDKFEFSPLNKMERALTGEMIKMICIPIKVDRLGNVLESSSSYKK

SEQ ID NO: 81 - protein, 1426 aa, Capnocytophaga sputigena
MKNILGLDLGITSISFAHIVEDENKEKSEIKELGVRIVSLTTDEQSDFEKGKSITTNANRTLKHGARLNLDRYQQRRKYLIDLLQKANLITSSSILAENGKNTTHSTWQLRAKAVTERIEKEEFARVLLAINKKRGYKSSRKAKTEDEGQAIDGMAIAKRLYDENLTPGQLSLQLLQQNKKLLPDFYRSDLQREFDLVWNFQKQFYPDILTDSFYKELQGKGKDATSKAFSKRYHFDTAENKGSKESVRLQAYQWRAEAISKQLSKEEVAYVLTEINNNLNNASGYLGAISDRSKELYFNRQTVGQYLYAQLQENRHNSLKNKVFYRQDYLDEFERIWETQASFHKELTDELKKQIRDVVIFYQRKLKSQKGLISFCEFESKEIEIEKDGKTITKTIGARVVPKSSPLFQEFKIWQILNNVTCKRKGIRKKKSSAKSTELDLFNEPSQTIFSLDMECKQLLFDELNLKGDLKSDKVLKLLGYSPQEWEINYNQLEGNRTQKALYEAYLKIVEMEAHDVKDILQIKSAKDDWSLDESPLSASEIKEKVKDIFQALGICTKILYFDPLLPVKEFEKQDSYQLWHLLYSYESDDSTSGNETLYRILEKKYAFKREHARILANVALQDDYGSLSTKAIRKIYPNIKENQYSKACELAGYKHSKLSLTTEELEARELKNIIPLLKKNALRNPVVEKILNQMINVVNALIEKNSERDAEGKITKYFHFDEIRIELARELKKNAQKRYEMTQNINKAKLEHQKISEILQKKFGIKNPTKSDIIRYRLYQELEHNGYKELYTNAPIARDMLFSKNIEIEHIVPKARVFDDSFSNKTLTFHRINSNKGEYTAFDYITSLNSEEELNQYLTRVENAYKTKSISLTKYKNLLKKASEIGDGFINRDLRDTQYIAKKAKEILFQVTKNVLSTSGSITDRLREDWGLVDVMKELNMPKYQSLGLTEVEERKEGNKVTVIKNWTKRNDHRHHAMDALTVAFTKPSYIQYLNHLNARKDENNKNYSVILAIEEKETIKVPTNNGKNKRVFIEPIPNFRQVAKKHLEEIFISHKAKNKVVTKNVNKPAGTDKQQITLTPRGQLHKETIYGKYQYYVNKEEKVGVKFDERTITKVSNPLYREALLKRLQANDNDPKKAFTGKNALSKNPIYLDETKTKTLPEKVNLTYLEEDFSIRKDISPDNFKDLKSIEKVIDQGVKRILIKRLQDYDNDPKKAFVDLEKNPIWLNKEKGIAIKRVTISGVSNAQPLHIGKDHLGKTTLNKEGNEIPVDYVSTGNNHHVAIYRDKEGNLQEQIVSFFEAVVRTQQGLPIIDKTYKQEEGWQFLFTMKQNEMFVFPNATTGFNPAEIDLLDPKNKKLISPNLFRVQKIATKDYFFRHHLETNVETDNVLKNTTWKREGLSGLKDIVKVRINHLGDIVSIGEY

SEQ ID NO: 82 - protein, 1443 aa, Parabacteroides johnsonii
MIKLLYLEKLKQYTMKKILGLDLGTSSIGWALVNEAENSDEVSSIIKLGVRVNPLTVDEMQNFEKGKSITTNADRTLKRSMRRNLQRYKLRRDALIELLKKVGFITDKTILSEQGNRTTFETYRLRAKAAEEEISLKELARVLLMINKKRGYKSSRKAKGEEEGALIDGMEIAKKLYDEDLTPGQLCLQLLESGKKFFPDFYRSDLQEEFNKIWDFQKQFNLFSFCDVAKEEVKGKNKSQTWAILAKYFVETKKVNVWNEHEAQTENREEVYKLVGLKRTVKGEELKKENYRWRVQALTEQLDLEKIAVVLQEINGQISASSGYLGAISDRSKVLYFNRQTVGQYQMAELNKNPNMSLRNMVFYRQDYLDEFNVIWEKQAEFHKELTPELKKEIRDIIIFYQRRLKSQKGLISFCEFENREVVVEKEGKKQTKIIGCKVIPRSHPLFQEFKIWQTLNNIEVFVGEKKGKRKKSNVSSDLFGDTEDALITEGRRFLYQEEKKILAKELSIKKGLTKAEILRLLFENPQELDINFKQIDGNQTGFALFSAYSNMIEKYGYEPLDFKKPAEDLISQLKTVFTDLGWNTDLLFIDLDKENKEWEKQPYFRLWHLLYSFEGDNTPTGNGKLIEKIMQLCGIEKEYAIELANVSLQDDYGSLSAKAIKKILLYLKEGNQYDMACEYAGYRHSKSSLTKEEIENKVLKDKLEILPKNSLRNPVVEKILNQMVNVINTVMEVYGRPDEIRVELARELKKSAKEREELTKAVAKNTREHEEIRKVLQSEFGMINVSRNDIIRYKLYEELKDNGYKTLYSNQYIPREKLFSKEIDIEHIIPQSRLFDDSLSNKTLEYKSINIEKGNKTAYDFVKEKYGEEGLQQYLNRCENLCKDKKAKLRKLKMELNEIPDGFIDRDLRNTQYIAKKALSMLTEICRRVVATTGSITDKLREDWQLVDVMKELNLPKYEALGLVEVYEDKDGRKIKRIKDWTKRNDHRHHAMDALTVAFTKDVFIQYFNNKNAAWESDSKEHTNIVGIKTRYFESGKAVPPIPLGQFRVEAKCHLENLLVSIKAKNKVVTTNVNCIKKKGGTYKNTQQTPRGQLHLETIYGSHNQYVTKIEKVNASFDAVKIATVSKQDYRNALLKRLEVFGNDPKKAFTGKNSLEKNPIYLDRAQTIQVPDKVQTVELETAYTIRKPVDPTLNVDKVVDKKIRLILEQRLKEYGGDAKKAFVNLDENPIWLNEEKGISIKRVTIRGISKAQALHDKKDKDGNFILDETGKRIPVDFVNTGNNHHVAIYRKPVLDKKGQVIFDDEGNPMYELDEDVVPFFEAVTRANLGIPIIDKDYKKSEGWQFLFSMKQNEYFVFPNEKTGFNPKEVDLLDPDNYAMISPNLFRVQKIGLNDYTFRHHLETTIQNDLKFITWIRCGKSGIKDIVKVRINHIGQIVSVGEY

SEQ ID NO: 83 - protein, 984 aa, Campylobacter jejuni
MARILAFDIGISSIGWAFSENDELKDCGVRIFTKVENPKTGESLALPRRLARSARKRLARRKARLNHLKHLIANEFKLNYEDYQSFDESLAKAYKGSLISPYELRFRALNELLSKQDFARVILHIAKRRGYDDIKNSDDKEKGAILKAIKQNEEKLANYQSVGEYLYKEYFQKFKENSKEFTNVRNKKESYERCIAQSFLKDELKLIFKKQREFGFSFSKKFEEEVLSVAFYKRALKDFSHLVGNCSFFTDEKRAPKNSPLAFMFVALTRIINLLNNLKNTEGILYTKDDLNALLNEVLKNGTLTYKQTKKLLGLSDDYEFKGEKGTYFIEFKKYKEFIKALGEHNLSQDDLNEIAKDITLIKDEIKLKKALAKYDLNQNQIDSLSKLEFKDHLNISFKALKLVTPLMLEGKKYDEACNELNLKVAINEDKKDFLPAFNETYYKDEVTNPVVLRAIKEYRKVLNALLKKYGKVHKINIELAREVGKNHSQRAKIEKEQNENYKAKKDAELECEKLGLKINSKNILKLRLFKEQKEFCAYSGEKIKISDLQDEKMLEIDHIYPYSRSFDDSYMNKVLVFTKQNQEKLNQTPFEAFGNDSAKWQKIEVLAKNLPTKKQKRILDKNYKDKEQKNFKDRNLNDTRYIARLVLNYTKDYLDFLPLSDDENTKLNDTQKGSKVHVEAKSGMLTSALRHTWGFSAKDRNNHLHHAIDAVIIAYANNSIVKAFSDFKKEQESNSAELYAKKISELDYKNKRKFFEPFSGFRQKVLDKIDEIFVSKPERKKPSGALHEETFRKEEEFYQSYGGKEGVLKALELGKIRKVNGKIVKNGDMFRVDIFKHKKTNKFYAVPIYTMDFALKVLPNKAVARSKKGEIKDWILMDENYEFCFSLYKDSLILIQTKDMQEPEFVYYNAFTSSTVSLIVSKHDNKFETLSKNQKILFKNANEKEVIAKSIGIQNLKVFEKYIVSALGEVTKAEFRQREDFKK

SEQ ID NO: 84 - protein, 1082 aa, Neisseria meningitidis
MAAFKPNPINYILGLDIGIASVGWAMVEIDEDENPICLIDLGVRVFERAEVPKTGDSLAMARRLARSVRRLTRRRAHRLLRARRLLKREGVLQAADFDENGLIKSLPNTPWQLRAAALDRKLTPLEWSAVLLHLIKHRGYLSQRKNEGETADKELGALLKGVADNAHALQTGDFRTPAELALNKFEKESGHIRNQRGDYSHTFSRKDLQAELILLFEKQKEFGNPHVSGGLKEGIETLLMTQRPALSGDAVQKMLGHCTFEPAEPKAAKNTYTAERFIWLTKLNNLRILEQGSERPLTDTERATLMDEPYRKSKLTYAQARKLLGLEDTAFFKGLRYGKDNAEASTLMEMKAYHAISRALEKEGLKDKKSPLNLSPELQDEIGTAFSLFKTDEDITGRLKDRIQPEILEALLKHISFDKFVQISLKALRRIVPLMEQGKRYDEACAEIYGDHYGKKNTEEKIYLPPIPADEIRNPVVLRALSQARKVINGVVRRYGSPARIHIETAREVGKSFKDRKEIEKRQEENRKDREKAAAKFREYFPNFVGEPKSKDILKLRLYEQQHGKCLYSGKEINLGRLNEKGYVEIDHALPFSRTWDDSFNNKVLVLGSENQNKGNQTPYEYFNGKDNSREWQEFKARVETSRFPRSKKQRILLQKFDEDGFKERNLNDTRYVNRFLCQFVADRMRLTGKGKKRVFASNGQITNLLRGFWGLRKVRAENDRHHALDAVVVACSTVAMQQKITRFVRYKEMNAFDGKTIDKETGEVLHQKTHFPQPWEFFAQEVMIRVFGKPDGKPEFEEADTPEKLRTLLAEKLSSRPEAVHEYVTPLFVSRAPNRKMSGQGHMETVKSAKRLDEGVSVLRVPLTQLKLKDLEKMVNREREPKLYEALKARLEAHKDDPAKAFAEPFYKYDKAGNRTQQVKAVRVEQVQKTGVWVRNHNGIADNATMVRVDVFEKGDKYYLVPIYSWQVAKGILPDRAVVQGKDEEDWQLIDDSFNFKFSLHPNDLVEVITKKARMFGYFASCHRGTGNINIRIHDLDHKIGKNGILEGIGVKTALSFQKYQIDELGKEIRPCRLKKRPPVR

SEQ ID NO: 85 - protein, 1021 aa, Clostridium cellulolyticum
MKYTLGLDVGIASVGWAVIDKDNNKIIDLGVRCFDKAEESKTGESLATARRIARGMRRRISRRSQRLRLVKKLFVQYEIIKDSSEFNRIFDTSRDGWKDPWELRYNALSRILKPYELVQVLTHITKRRGFKSNRKEDLSTTKEGVVITSIKNNSEMLRTKNYRTIGEMIFMETPENSNKRNKVDEYIHTIAREDLLNEIKYIFSIQRKLGSPFVTEKLEHDFLNIWEFQRPFASGDSILSKVGKCTLLKEELRAPTSCYTSEYFGLLQSINNLVLVEDNNTLTLNNDQRAKIIEYAHFKNEIKYSEIRKLLDIEPEILFKAHNLTHKNPSGNNESKKFYEMKSYHKLKSTLPTDIWGKLHSNKESLDNLFYCLTVYKNDNEIKDYLQANNLDYLIEYIAKLPTFNKFKHLSLVAMKRIIPFMEKGYKYSDACNMAELDFTGSSKLEKCNKLTVEPIIENVTNPVVIRALTQARKVINAIIQKYGLPYMVNIELAREAGMTRQDRDNLKKEHENNRKAREKISDLIRQNGRVASGLDILKWRLWEDQGGRCAYSGKPIPVCDLLNDSLTQIDHIYPYSRSMDDSYMNKVLVLTDENQNKRSYTPYEVWGSTEKWEDFEARIYSMHLPQSKEKRLLNRNFITKDLDSFISRNLNDTRYISRFLKNYIESYLQFSNDSPKSCVVCVNGQCTAQLRSRWGLNKNREESDLHHALDAAVIACADRKIIKEITNYYNERENHNYKVKYPLPWHSFRQDLMETLAGVFISRAPRRKITGPAHDETIRSPKHFNKGLTSVKIPLTTVTLEKLETMVKNTKGGISDKAVYNVLKNRLIEHNNKPLKAFAEKIYKPLKNGTNGAIIRSIRVETPSYTGVFRNEGKGISDNSLMVRVDVFKKKDKYYLVPIYVAHMIKKELPSKAIVPLKPESQWELIDSTHEFLFSLYQNDYLVIKTKKGITEGYYRSCHRGTGSLSLMPHFANNKNVKIDIGVRTAISIEKYNVDILGNKSIVKGEPRRGMEKYNSFKSN

SEQ ID NO: 86 - protein, 1131 aa, Acidovorax ebreus
MAQHVFGLDIGIASVGWAILGEQRIIDLGVRCFDKAETAKEGDPLNLTRRQARLLRRRLYRRAWRLTQLSRLLKRKGLIADAKLFAKAPSYGDSAWELRRQGLDRLLTPLEWARVIYHQCKHRGFHWTSKAEEAKADSDAEGGRVKQGLAHTKALMQAKNYRSAAEMVLAEFPDAQRNKRGQYDKALSRVLLGEELALLFATQRRLGNPHASDFFEKLILGDGDRKSGLFWQQKPALSGADLLKMLGKCTFEKGEYRAPKASFSVERHVWLTRLNNLRIVVDGRSRPLNEAERQAALLLPYQTETSKYKTLKNAFIKAGLWGDGVRFGGLAYPSQAQIDAEKTKDPEDQFLVKLPAWHELRKAFKAAGHEALWQQISTPALDGDPTLLDQIATVLSVYKDGAEVVQQLRQLALPEPAASIAVLEKISFDKFSSLSLKALRRIVPLMQSGLRYDEAVAQIPEYGHHSQRIEPGAAKHLYLPPFYEAQRKYAGKGDHIGSMQFRDDADIPRNPVVLRALNQARKVVNALIREYGSPIAVNIEMARDLSRPLDERNKVKRAQEEFRDRNDRARSEFERDFGYKPKAAAFEKWMLYREQLGQCAYSQQPLDIQRVLDDHNYAQVDHALPYSRSYDDSKNNKVLVLTHENQNKGNRTAFEYLTSFPDGEDGERWRTFVAWVQGNKAYRMAKRNRLLRKNYGVDESKGFIDRNLNDTRYICKFFKNYVEEHLQLAARADGDTARRCVVVNGQLTAFLRARWGLTKVRGDSDRHHALDAAVVAACTHGMVKALADYSRRKEISFLQEGFPDPETGEILNPAAFDRARQHFPEPWTHFAHELKARLFTDDLAALREDMQRLGSYTTEDLGRLRTLFVSRAPQRRSGGAVHKETIYAQPESLKQQGGVIEKILLTSLKLQDFDKLLNPESNDHFVEPHRNERLYAAIRQRLEQFGGRADKAFGPDNLFHKPDKNNQPTGPVVRSIKLVRGKQTGIPIRGGLAKNDSMLRVDIFTKAGKFHLVPVYVHHRVTGLPNRAIVAFKDEDEWTLIDESFAFLFSVYPNDYVKVTLKKEQQSGYYSGADRSTGAMNLWAHDRAASVGKDGLIRGIGVKTALSVEKFNVDVLGRIYLAPPETRSGLA

SEQ ID NO: 87 - protein, 1122 aa, Streptococcus suis
MSNGKILGLDIGIASVGVGVIDAQTGEIIHASSRIFPSANAANNAERRTFRGSRRLIRRKKHRIKRLDDLFNDFHINLDGEMSTDNPYVLRVKGLSQKLTVEELYISIKNIMKRRGISYLDDAESDNEAGRSDYAKAIERNRQLLTSKTPGEIQLERLEKYGQLRGNFTIIDEEGQSQQIINVFSTSDYVKEVEKILDCQKMYHKFISDEFCDKLIELLREKRKYYVGPGNEKSRTDYGIYRTDGTTLENLFGILIGKCTFYPDQYRSSRASYTAQEFNFLNDLNNLTVPTETKKLSQEQKEFLVNYAKETSVLGAGKILQQIAKLADCKVEDIRGYRLDNKDKPELHTFETYRAMKGLVPLVDIGVLSREQLDILADILTLNTDFEGIREALKKQLPNVFDEKQVKGLASFRKSKSQLFAKGWHNLSQKIMLEVIPELYATSDEQMTILTRLGKFEKSSVAEYPSSINVDEITDEIYNPVVAKSIRQTIKIINASIKKWGEFDQIVIEMPRDRNEDEEKKRIADGQKANAKEKADSILRAAELYCAGKVLPDYVYNGHNQLATKIRLWYQQGERCIYTGQPISIHDLIHNQNQYEIDHILPLSLTFDDSLSNKVLVLATANQEKAQRTPYNYLKSATSAWSYREFKDYVTKRKGIGKKKCEYLTFEEDINGFEVRSKFIQRNLVDTRYASKVILNALQDYFKISGIQTKVSVVRGQFTSQLRHKWGIEKTRETYHHHAVDALIIAASSQLRLWKKQESPLVVDYQEGRQVDLETGEILELTDEQYKELVYQPPYQGFVNTISSSAFDNEILFSYQVDSKVNRKISDATIYATRNAQLGKDKTEGIYVLGKIKDIYTQAGYEAFLKRYTKDKTSFLMYHKDLDTWEKVIEIILRDYREYDEKGKEIGNPFERYRRENGYVKKYSRKGNGTAIKSLKYYDNKLGNHIDITPENSRNAVVLQSLKPWRTDVYFNKETGKYEFLGIKYSDLSFEKGTGEYGISQEKYDSIKIAEGVAKKSIFKFTLYKQDLLFIKDIENNFGKLLRFTSKNDTSKHYVELKPYDKNKFGTEEPLLPVLGNVAKSGQCIKGLNKSNISIYKVRTDILGYRHFIKQEGEHPQLKFKK

SEQ ID NO: 88 - protein, 1509 aa, Bacteroides coprophilus
MKKTLGLDLGTNSIGWAVINSNIDSEGKEKLVGISSCGSRIIPMDATTLGDFGKGNTKSPVAERTRLRGIRRLLERSLLRRERLHRVLSVMGFLPEHYASQLDRYGKFLPETEPKLAWYKDDSGRYQFLFQKSFHEMLEDFRQHQPELVAGEKKIPYDWTIYYLRKKALSQEITKEELAWILLNFNQKRGYYQLRGEEEQEENNKSVEYHALKVVSVEDSGERKGKDIWYNVTLENGWVYRRASNIPLDWTGKVKEFVVTTELDDAGNPKKDKEGNVKRSFRAPKEDDWGLLKTRTQAQIDESGKTVGTYIYESLLCMPNQKIRGKLVRTIERKYYKDELRQILVKQSEFHAALQDHNLLLSCIEELYPNNEAHRRLLSASSFIYFLIEDILFYQRPLKSQKGLIDNCPYESHIYKDKKDGSLHHVPLKCVSKSHPLFQEFRLWQFLSNLRIYQRERMMDGSLKLDVDVTREFLPSEEDYVKLFDWLNERKEISQKFLLAYKPFGLKKNEQANYRWNYVEDKSYPCNETRAEIKSRLSKAGVPEEFLTEEKEEALWHILYSISDKKELTKALGTFAAKNCLNESFVEVFAKIPPFESNYAAYSLKAIRKLLALMRMGKYWNEQAIDRQTRDRIEKILTGEYDETIRSRVREKAMLLTDISSFRGLPLWLACYIVYDRHSESKELVKWETPADIDHFLSKFKQNSLRNPIVEQVITESLRTVRDIWKQEGKIDEIHVELGREMKNPAKERARITAQVQENENTNLRIKALLAEFMNPEFEIENVHPYSPGQQEILRIYEDGVLSGIAEKDLPDDITAILKKFRENDVKKRPTTSEVLRYKLWLEQRYRSPYTGRVIPLGKLFTPAYEIEHVIPQSRYFDDSISNKVICESAVNKLKDNCLGYEFIKKHSGEMVELGNGETVPVFSVEEYERFVKESYFGNSKKMKKLLLEDIPDSFIERQLNDSRYISRVVTSLLSNLVCEEGEQDGLSKNVIVCTGGITDRLKKDWGVQEVWNRIILPRFLRLNEITGRTDFTSTSVNGHLLPALPLYLQKGFNKKRIDHRHHAMDAIVIACANRNIVNYLNNSSARKNSEISRYDLQRLLCEKVKTDANGNYKWILRKPWETFTQDVYAALTNIVVSFKQNLRVINRTTNYYQHYNEAGEKRMIPQTKGDRWAIRKPMHKDTVYGEVNLRKEKTLPLRDVVKNPSIVVDKSLKNKLYELLKSQYDLKAIAKYFETHQDVWADVNLKKIKVYYFTKETNERFFATRKSLDPSFDQKKIEEEVTDTGVQKILLHHLQQNNNDPDMAFSPDGIDRMNQNMTILNDGKWHQPIYKVRTYEKADKFAVGESGNKAKKFVEAAKGTNLFFAVYESVQEDEAIGKQVCKRTFATIPLNEVIKRKKQGLPAAPEDLNGNLPKFVLSPNDLVYLPTEEERNSSRIIQPLDRERIYKMVSSSGSQCFFIKVFVANSIWDKNEYSSLNKMERAITNEMIKEICVPIKIDRLGNVSLIQI

SEQ ID NO: 89 - protein, 1219 aa, Bacteroides cellulosilyticus
MKEEVRGKNRSQTWAILAKFFVWSEKESVWNEKEARTEERVKEYKLVGLKRDTKGNELKLENYRWRVQALSEQLNPEIVAIVLQEINGQISASSGYLGAISDRSKQLYFNRQTVGQYLMSELEKDPNVSLRNRVFYRQDYLDEFDRIWEKQAEFHEELTVELKKEIRDIIIFYQRRLKSQKGLISFCEFEKREVVVEEDGRKKNKTVGCRVIPRSHPLFQEFKIWQTLNDIEVFAWDKQSKRKKADKSSILFDNSEDALLVEGKRFLYQEEKELLAKELFVKESMKKAEVLKLLFENYQELDLNFKQIDGNHTGFALFSAYSKMIEKYGYEPVDFKRSADEIIEKLETIFTNLGWNTELLSIDLSKEDKELERQSYFRLWHLLYSFEGDNTPTGNGKLLEKIMQLCDVEKEYAVELANVSFQEDYGSLSAKAIKKILPYLKEGNQYDVACDYAGYRHSRSSLTKDEIENKILKDKLEILPKNSLRNPVVEKILNQMVNLINTLIDTYGKPDEIRVELARELKKNAKEREELTKSIARNTREHDEIRQLLRTEFGMMNVSRNDIIRYKLYEELKDNGYKTLYSNEYIPREKIFSKEIDIEHVIPQARLFDDSLSNKTLEYRAINIEKGNKTAYDFVKEKYGNDGLEKFLNRCETLFKDKRTKLRKLKMEEKDIPEGFIDRDLRNTQYISKKAFAMLNEISRRVVATTGSITDKLREDWQLVDLMKELNLPKYEKLGMVEMFEDKDGRKIKKITDWTKRNDHRHHAVDALTVAFTKDVFIQFYNNKNAAWMPASKEHANITGIKARYFENGKALAPMPLAQFRAEAKRHLENLLVSIKAKNKVITSNVNRTKNKNGENRKLQQTPRGQLHLETVYGSHRQYATKIEKVNAAFDVTKIATVSKLAYRNALLKRLEAFGNDPKKAFTGKNTLEKNPLYLDENQTEMVPEKVQTVEFETVYTIRKPIDPNLSIDKVVDVKIRSVLEKRLKEYGGDAKKAFVNLDENPIWLNEAKGISIKRVSIRGISNAQSLHEKKDKDGNLILGKEGRKIPVDFVNTGNNHHVAIYKKPVLDKVGQVVLDEEGNPKYELDEVVVSFFDAVTRANLGQPIIDKDYRRSEGWQFLFSMKQNEYFVFPNDKTGFNPKEVDLLNPENYALISPNLFRVQKFAYKNYVFRHHLETTIKDTSSTLKGITWTDFRSSKGLDKIVKVRVDHIGQIVSIGEY

SEQ ID NO: 90 - protein, 1329 aa, Catenibacterium mitsuokai
IVDYCIGLDLGTGSVGWAVVDMNHRLMKRNGKHLWGSRLFSNAETAANRRASRSIRRRYNKRRERIRLLRAILQDMVLEKDPTFFIRLEHTSFLDEEDKAKYLGTDYKDNYNLFIDEDFNDYTYYHKYPTIYHLRKALCESTEKADPRLIYLALHHIVKYRGNFLYEGQKFNMDASNIEDKLSDIFTQFTSFNNIPYEDDEKKNLEILEILKKPLSKKAKVDEVMTLIAPEKDYKSAFKELVTGIAGNKMNVTKMILCEPIKQGDSEIKLKFSDSNYDDQFSEVEKDLGEYVEFVDALHNVYSWVELQTIMGATHTDNASISEAMVSRYNKHHDDLKLLKDCIKNNVPNKYFDMFRNDSEKSKGYYNYINRPSKAPVDEFYKYVKKCIEKVDTPEAKQILNDIELENFLLKQNSRTNGSVPYQMQLDEMIKIIDNQAEYYPILKEKREQLLSILTFRIPYYFGPLNETSEHAWIKRLEGKENQRILPWNYQDIVDVDATAEGFIKRMRSYCTYFPDEEVLPKNSLIVSKYEVYNELNKIRVDDKLLEVDVKNDIYNELFMKNKTVTEKKLKNWLVNNQCCSKDAEIKGFQKENQFSTSLTPWIDFTNIFGKIDQSNFDLIENIIYDLTVFEDKKIMKRRLKKKYALPDDKVKQILKLKYKDWSRLSKKLLDGIVADNRFGSSVTVLDVLEMSRLNLMEIINDKDLGYAQMIEEATSCPEDGKFTYEEVERLAGSPALKRGIWQSLQIVEEITKVMKCRPKYIYIEFERSEEAKERTESKIKKLENVYKDLDEQTKKEYKSVLEELKGFDNTKKISSDSLFLYFTQLGKCMYSGKKLDIDSLDKYQIDHIVPQSLVKDDSFDNRVLVVPSENQRKLDDLVVPFDIRDKMYRFWKLLFDHELISPKKFYSLIKTEYTERDEERFINRQLVETRQITKNVTQIIEDHYSTTKVAAIRANLSHEFRVKNHIYKNRDINDYHHAHDAYIVALIGGFMRDRYPNMHDSKAVYSEYMKMFRKNKNDQKRWKDGFVINSMNYPYEVDGKLIWNPDLINEIKKCFYYKDCYCTTKLDQKSGQLFNLTVLSNDAHADKGVTKAVVPVNKNRSDVHKYGGFSGLQYTIVAIEGQKKKGKKTELVKKISGVPLHLKAASINEKINYIEEKEGLSDVRIIKDNIPVNQMIEMDGGEYLLTSPTEYVNARQLVLNEKQCALIADIYNAIYKQDYDNLDDILMIQLYIELTNKMKVLYPAYRGIAEKFESMNENYVVISKEEKANIIKQMLIVMHRGPQNGNIVYDDFKISDRIGRLKTKNHNLNNIVFISQSPTGIYTKKYKL

SEQ ID NO: 91 - protein, 1152 aa, Roseburia inulinivorans
MNAEHGKEGLLIMEENFQYRIGLDIGITSVGWAVLQNNSQDEPVRITDLGVRIFDVAENPKNGDALAAPRRDARTTRRRLRRRRHRLERIKFLLQENGLIEMDSFMERYYKGNLPDVYQLRYEGLDRKLKDEELAQVLIHIAKHRGFRSTRKAETKEKEGGAVLKATTENQKIMQEKGYRTVGEMLYLDEAFHTECLWNEKGYVLTPRNRPDDYKHTILRSMLVEEVHAIFAAQRAHGNQKATEGLEEAYVEIMTSQRSFDMGPGLQPDGKPSPYAMEGFGDRVGKCTFEKDEYRAPKATYTAELFVALQKINHTKLIDEFGTGRFFSEEERKTIIGLLLSSKELKYGTIRKKLNIDPSLKFNSLNYSAKKEGETEEERVLDTEKAKFASMFWTYEYSKCLKDRTEEMPVGEKADLFDRIGEILTAYKNDDSRSSRLKELGLSGEEIDGLLDLSPAKYQRVSLKAMRKMQPYLEDGLIYDKACEAAGYDFRALNDGNKKHLLKGEEINAIVNDITNPVVKRSVSQTIKVINAIIQKYGSPQAVNIELAREMSKNFQDRTNLEKEMKKRQQENERAKQQIIELGKQNPTGQDILKYRLWNDQGGYCLYSGKKIPLEELFDGGYDIDHILPYSITFDDSYRNKVLVTAQENRQKGNRTPYEYFGADEKRWEDYEASVRLLVRDYKKQQKLLKKNFTEEERKEFKERNLNDTKYITRVVYNMIRQNLELEPFNHPEKKKQVWAVNGAVTSYLRKRWGLMQKDRSTDRHHAMDAVVIACCTDGMIHKISRYMQGRELAYSRNFKFPDEETGEILNRDNFTREQWDEKFGVKVPLPWNSFRDELDIRLLNEDPKNFLLTHADVQRELDYPGWMYGEEESPIEEGRYINYIRPLFVSRMPNHKVTGSAHDATIRSARDYETRGVVITKVPLTDLKLNKDNEIEGYYDKDSDRLLYQALVRQLLLHGNDGKKAFAEDFHKPKADGTEGPVVRKVKIEKKQTSGVMVRGGTGIAANGEMVRIDVFRENGKYYFVPVYTADVVRKVLPNRAATHTKPYSEWRVMDDANFVFSLYSRDLIHVKSKKDIKTNLVNGGLLLQKEIFAYYTGADIATASIAGFANDSNFKFRGLGIQSLEIFEKCQVDILGNISVVRHENRQEFH

SEQ ID NO: 92 - protein, 686 aa, Coprococcus comes
MKKQDSPKNNMGYTAYNLNVLGYEEFAKRVELLFKDTDAVKRLNDSHMQMAEGFDLNALPGSPALRRGVSQAIKVLDDIVSVAGKAPDRIYLKVTRTASNSRKGKRTAKRSDKIKQALKALDADAAADLGAAKLLRELGMFDEKEINERIYLYFHQAGKCLYTGKPIDITRIASNDYYVDHVVPLAYRKDESLDNKVLVYAEASRYKSETLLVSPAVQRKMLPFWRMLRNAGLMSERKLNALIRTEISEGMLKSIIGRQFTENSWEAKLFTAAIAAKYPGTVVIPVKAGVIGAVRSRIGIPKSLKANQFYHAHDALLAAEVGRYMELAKPAFVHNRVKYEQYMRKIKLVNEENKKAPKSQLDFFAGGFFFDRVDKDTGEVYWNKDEEVERIYRACGWKNLRVTYAAFEDGGAFWKQTIYSPREKSKLIATKSDRPAEIYGGYSSQTFANFFVYEVMKKKVKQLRFGAVPAAIASKSDPDTYNAMLEMYARGLAKTAKEKFVRIVRARVLKNTMIELYGERFRIAGEKQVYPVRQMPLAIDEVYLLKGVETIAAAGNAGASAKIDFEKAAESLVGFWDLLLEKLPVNYPKLTVQLKLGLLKHPKDILAATSESEFPAIVYKIAEAEIQVMEQASGLRNMSDTKILGGNTFGGSLVFTFNKVLNDPKSKACFIDTTPAGLYEVKTKIW

SEQ ID NO: 93 - protein, 1105 aa, Actinomyces coleocanis
MDNKNYRIGIDVGLNSIGFCAVEVDQHDTPLGFLNLSVYRHDAGIDPNGKKTNTTRLAMSGVARRTRRLFRKRKRRLAALDRFIEAQGWTLPDHADYKDPYTPWLVRAELAQTPIRDENDLHEKLAIAVRHIARHRGWRSPWVPVRSLHVEQPPSDQYLALKERVEAKTLLQMPEGATPAEMVVALDLSVDVNLRPKNREKTDTRPENKKPGFLGGKLMQSDNANELRKIAKIQGLDDALLRELIELVFAADSPKGASGELVGYDVLPGQHGKRRAEKAHPAFQRYRIASIVSNLRIRHLGSGADERLDVETQKRVFEYLLNAKPTADITWSDVAEEIGVERNLLMGTATQTADGERASAKPPVDVTNVAFATCKIKPLKEWWLNADYEARCVMVSALSHAEKLTEGTAAEVEVAEFLQNLSDEDNEKLDSFSLPIGRAAYSVDSLERLTKRMIENGEDLFEARVNEFGVSEDWRPPAEPIGARVGNPAVDRVLKAVNRYLMAAEAEWGAPLSVNIEHVREGFISKRQAVEIDRENQKRYQRNQAVRSQIADHINATSGVRGSDVTRYLAIQRQNGECLYCGTAITFVNSEMDHIVPRAGLGSTNTRDNLVATCERCNKSKSNKPFAVWAAECGIPGVSVAEALKRVDFWIADGFASSKEHRELQKGVKDRLKRKVSDPEIDNRSMESVAWMARELAHRVQYYFDEKHTGTKVRVFRGSLTSAARKASGFESRVNFIGGNGKTRLDRRHHAMDAATVAMLRNSVAKTLVLRGNIRASERAIGAAETWKSFRGENVADRQIFESWSENMRVLVEKFNLALYNDEVSIFSSLRLQLGNGKAHDDTITKLQMHKVGDAWSLTEIDRASTPALWCALTRQPDFTWKDGLPANEDRTIIVNGTHYGPLDKVGIFGKAAASLLVRGGSVDIGSAIHHARIYRIAGKKPTYGMVRVFAPDLLRYRNEDLFNVELPPQSVSMRYAEPKVREAIREGKAEYLGWLVVGDELLLDLSSETSGQIAELQQDFPGTTHWTVAGFFSPSRLRLRPVYLAQEGLGEDVSEGSKSIIAGQGWRPAVNKVFGSAMPEVIRRDGLGRKRRFSYSGLPVSWQG

SEQ ID NO: 94 - protein, 1361 aa, Anaerococcus tetradius
MGNYYLGLDIGTNSVGWAVTDENYNIERFKKKNMWGIRLFDEAKTAESRRIHRQARRMRQRKIQRLNLLMELFDVEISKVDESFFIRKKESDLHYEDKSQDSRYALFNDKEFNDKDYHNKYPTIFHLIMDLIENDEKKDIRLLYLACHYLIKNRGHFIFEGQKFDVNSSLNNNINKLKSHLDQFYNICLDFDNDKLIEILVNQNLNISEKSKKIKELLRKTNLEVGIANLIAGGSIKLSNMFDDDELKNLDYNSLSFKNSNFDEGRELFEEVLEDRFELVEILKDIHDASVLETMLSSASISPDGGKYISSSMINSYNKHKRDLKLLKKIIKKYKKSEYDNIFRDENIKNNYLSYTRTGINKNKKVQAEDNTDSDGFYKYIVKILKDIKENDSDEDIKYILSEIDKKNFVPKQRTKENSVIPYQLREIELRKIIDNQSKYHKFLNEVDEKGISVKEKIISLLTFRIPYYIGPLNPSYNEEKNFTTSWVKRLAKGKVTPWNFEDMVDIDASREAFIENKLNKCSFLLDETVLPKDSLLYQEYMVLNELNNLKINGQSINTDLKKSIYEELFKKYKKVTRKRLISYIKEKENMSGDIVITGIDGDFKQGLKSYIAFKDIIGEKIDDDIYRKEVEKIIRDISLYGDDKSFIQKKIKNENKLDLSDDQISKIAKLKFKDWGRFSKKLLVGIKASDKNTGEIDNIIGFMRNYNYNIMQLMANVFTFKDEIEKLNSKYYTDEKINIDYLDDLYLSSPAKRMLWQSFQIVDEIKNIKNSDPKKIFIEMARSKEDKPTRKMSRKSRLEKLYTDSKKQFIKLFGPDEYDKLNNEIKNKSESDFRWDNLYLYYTQFGRCMYSLDPIDLEELSNKNLYDQDHIYPKSKIYDDSIENRVLVKKQLNLDKSNEYPIPDRVLNKDKNKLLAFWKMLNEKELIGDKKYARLIRKSPFTDEELGDFIARQLVETRQATKETANMLKRLCPDSKIVYVKAKNVSDFRRKFDILKCRSINDLHHAHDAYLNIVVGNVFDTKFTSNPLNFIKNNSKNRSYNLEKIYDYDVIRNEKIAWLAERKEENQDGSIATVLKNLSKNDIRVTRRTYIKCEDLFDENIVRKGNGKFPIKENNNKSDTNKYGGYSGIKNAYFVLLEDEKHNRILEAIPSFIYKKEKNGEKGSVINYLQNILGIKSAKILRDKIKIGSLLKIDKFPYNLAGKSGNGILISGGVQLILDKNTSKYIKKIENYKYKLDENKDYQINIFDKLSKEENIKLFDLFVDKFENSIYKNRVNIKLKEIKLARPKFEHLSIEEQIKTLTQMLILFGRENNAVNLEYIGLPKNTGKTKINKKINNKDIKIINQSITGLYETEEDLANI

SEQ ID NO: 95 - protein, 1377 aa, Lactobacillus brevis
MESNHDGEQVKYTLGLDIGTSSIGYAAIDKHQKPIRAKGKHVIGVRLFQEGQTAADRRAFRTTRRRLKRRKWRLNLLNRLFDPYLSEVDPNFLPRLRQSNLSPKDDNKHFNGSTLFPDKTDAAFYRQYPTMYHLRYALMTEKRKFDIREVYLAIHHIVKYRGNFLNSATVDSFKTSNIDFTSQFDRLNELYRQVILDEPFQINMDQVDEMTNKLLDNDALKLDTQKQVAKLLPVIYNDKPIDKQYTRIATEFSKAILGYKTKLDVILNLDTQNAKDWVIRLDDEDIDDKLPALVENLDESRQEIVTIIRDLYAQITLNAIVPKGKSLSESMVDKYNDHKDHLDLLMGLIHELGDDSAKGIKLREAYTQYVGKSDDKTLNQDDFYAAIKKNLDEDSKRSPKIQRLIEQASFMPKQRTSANGVIPHQLHQLELDRIIENQGRYYPFLKKPNPNTHKPNGGKYKLDELVAFRIPYYVGPLITKRDQEKTSGADFAWMIRKPGQEGEITPWNFDQKVDRMASANRFIRRMTTKDSYLVAEDVLPDASLIYEKFKALNELNMLKVNDSRLSPSQKQDLFNNLFKKQKTIRTKKLQTYIRTNWELPSVMISGLADPDKFNSSLSTYIDFRDIFGEKVDDPNRQADYEEIIEWSTVFEDRKIYQAKLNQLDWLTEPQRKALLTKRYTGWGRLSKKLLTGLKDQNGDSILDQLWKTNDNFMQIQSRDEFAKQIHDENAKQFHEANNVDDILDDAFTSPQNKKAIRQVDKVVQDVVKAVGYAPDKIAIEFTRSLENNPQRTVSRQRQLQAAYKNIPREIMKSGLMAELGSVADSKKVLSDKLYLYFTQMGKDMYEDKTINIDNLPNYDIDHILPQAFIKDDSIDNRVLISKEENARKSNRVPLKFFGAKRMGFWKDLLNNGLISNRKFQNLTTDPEKISKYSAKGFIHRQLVETSQVIRLVANILGNEYSQAGTTIIEVSAKMNRQLREDFHLIKNRNVNDYHHAMDAYLTAYVGDYLYLRYPKLRPYFVYGDFKKAEDQDLNIRNFNFLHDLKDNESLDKIVDSETGEIVWEKHGSVKQLKKVYHYKFMLVSQEVYTRQDALFNQTIYPASDADKRKLIPIKNSKPVDVYGGYSGNIDAYMAIVRVHGKKEDNYKVVGIPMRAVTKLKKAEKEGHDSYLNAVHEVLKPQFTKKKKNRKTGEITETVDEFDVLLGKVYYRQLIVDGNKKFMLGSSSYQYNAKQLVLSDKAMQVLSKNGKVKSQDENQNLIDVYDEILEKVDQYFELYDQRHYRESLHKGRGIFVNLPLSNQYDGSKLTSYGKYETIDAILNGLHANATMSNLRYLGISSPFGKMQASNGLTIDPDSIICYQSPTGLFERQIKLSDL

SEQ ID NO: 96 - protein, 1239 aa, Lactobacillus buchneri
MTEKRKFDIREVYLAIHHIVKYRGNFLNSATVDSFKTSNIDFTSQFDRLNELYRQVILEEPFQINMNQVDKMTNKLLDNDALKLDTQKQVAKLLPVIYNDKPVDKQYTRLATEFSKAILGYKTKLDVILNLDTQNAKDWAIRLDDEDIDDKLPALVENLDESRQEIVTIIRDLYAQITLNAIVPKGKSLSESMVDKYNDHKDHLDLLMGLIHELGDDSAKGIKLREAYTQYVGKSGDKTLNQDDFYAAIKKNLDEDSKRSPKIQRLIEQASFMPKQRTSANGVIPHQLHQLELDRIIENQGRYYPFLKEPNSNTHKPNGGKYKLDELVAFRIPYYVGPLITKQDQEKTSGADFAWMIRKPGQGGEITPWNFDQEVDRMASANTFIRRMTTKDSYLVAEDVLPDSSLIYEKFKVLNELNMLKVNDRRLSISQKQDLFNNLFKKQKTIRTKKLQTYIRTKWELPSVMISGLSDPDKFNSSLATYIDFRDVFGEKVDDPNRQADYEKIIEWSTVFEDRKIYQAKLNQLDWLTESQSKALLTKHYTGWGRLSKKLLTGLKDQNGDSILDQLWKTNDNFMQIQSRDEFAKQIHDENAKQFHEANNVDDILDDAFTSPQNKKAIRQVDKVVQDVVKAVGYAPDKIAIEFTRSPQDRPQRTFSRQRQLQSTYLNVAKALMKSNLNQELKSVIDSQQTLTDKLYLYFTQLGQDMYTGKEINFDELVNYQIDHILPQAFIKDDSLDNRVLVSAPINNAKSDNVPVKKFGAKMGYFWKQLAENHLISKRKLNNLTTDPDKIGKFTAQGFIHRQLVETSQVIRLVANILGNEYGHDGTTIIEVTAKMNHQMRKDFDLIKIRDVNDYHHAMDAYLTAYVGDYLYLRYPKLRSYFVYGDFKKLKDQSLKIRNFNFLHDLTNDEAGDKIVDQETGEIIWDKHESVKQLKKVYHYKFMLVSQEVYTRQDALFNQTIYPASDADKRKLIPIKNNKPVDVYGGYSGNVDAYMAIVRIHGKKEDKYKVVGVPMRAVADLKKAESKGRDNYLNAVHEVLKPQFTKKKKDRKTGEITEMMDDFDVLLGKVYYRQLIVDGNKKFMLGSSTYQYNAKQLVLSDKAMQVLSKDDKLKNQDENQNLIDVYDEILEKVDQYFELYDINKFRQKLHDGRKKFIELPVDNDFNGKKLISYGKRATIISILNGLHANATMSNLKYLGISSPFGMLQVPNGIILSPASRICYQSPTGLFERKVKLSDL

SEQ ID NO: 97 - protein, 1381 aa, Lactobacillus fermentum
MDYVKEYHIGLDIGTSSIGWAVTDSQFKLMRIKGKTAIGVRLFEEGKTAAERRTFRTTRRRLKRRKWRLHYLDKIFAPHLQEVDENFLRRLKQSNIHPEDPAKNQAFIGKLLFPDLLKKNERGYPTLIKMRDELPVEQRAHYPVTNIYKLREAMINEDRQFDLREVYLAVHHIVKYRGHFLNNASVDKFKVGRIDFDKSFNVLNEAYEELQNGEGSFTIEPSKVEKIGQLLLDTKMRKLDRQKAVAKLLEVKVADKEETKRNKQIATAMSKLVLGYKADFATVAMANGNEWKIDLSSETSEDEIEKFREELSDAQNDILTEITSLFSQIMLNAIVPNGMSISESMMDRYWTHERQLAEVKEYLATQPASARKEFDQVYNKYIGQVPKEKGFDLEKGLKKILSKKENWKEIDELLKAGDFLPKQRTSANGVIPHQMHQQELDRIIEKQAKYYPWLATENPATGERDRHQAKYELDQLVSFRIPYYVGPLVTPEVQKATSGAKFAWAKRKEDGEITPWNLWDKIDRAESAEAFIKRMTVKDTYLLNEDVLPANSLLYQKYNVLNELNNVRVNGRRLSVGIKQDIYTELFKKKKTVKAGDVASLVMAKTRGVNKPSVEGLSDPKKFNSNLATYLDLKSIMGDKVDDNRYQMDLENIIEWRSVFEDGEIFADKLTEVEWLTDEQRSALVKKRYKGWGRLSKKLLTGIVDENGQRIIDLMWNTDQNFMQIVNQPVFKEQIDQLNQKAITNDGMTLRERVESVLDDAYTSPQNKKAIWQVVRVVEDIVKAVGNAPKSISIEFARNEGNKGEITRSRRTQLQKLFEDQAHELVKDTSLTEELEKAPDLSDRYYFYFTQGGKDMYTGDPINFDEISTKYDIDHILPQSFVKDDSLDNRVLVSRAENNKKSDRVPAKLYAAKMKPYWNQLLKQGLITQRKFENLTMDVDQNIKYRSLGFVKRQLVETRQVIKLTANILGSMYQEAGTDIIETRAGLTKQLREEFDLPKVREVNDYHHAVDAYLTTFAGQYLNRRYPKLRSFFVYGEYMKFKHGSDLKLRNFNFFHELMEGDKSQGKVVDQQTGELITTRDEVAKSFDRLLNMKYMLVSKEVHDRSDQLYGATIVTAKESGKLTSPIEIKKNRPVDLYGAYTNGTSAFMTIIKFTGNKPKYKVIGVPTTSAVGLKRVGKPGSESYNQELHRIIKSNPKVKKDFEIVVPHVSYSQLIVDGDCKFTLASDTYQHPATQLVLSKESMEIIADDFKFVKENPATADEQLVRVFDEIVNQMNHYFTIFDQRSNRQKVTKARDKFVSLPTESEYEGAKKTQVGKTEVITNLLMGLHANAAQGDLKVLGLSTFGFFQSSGGLNLSEDAMIVYQSPTGLFERRICLKDI

SEQ ID NO: 98 - protein, 1306 aa, Sphingobacterium spiritivorum
MKHILGLDLGTNSIGWALIKQNFENKQGEILGMGSRIIPMGAELSKFEQGQAQTKNANRRIARGTRKLNKRYKQRRNKLIYILQGLGMLPDQIKLVNQFSDPNKLDKISILPISKNQQQLTAFDLLELRVKALTEKIELEELGKVIYKYNQLRGYSGGNSEPEKEENNEDESEENEKTNDSFVVFSKVLSLGLPEEITFKGKKLSKRKIAIETEDGIIEAETFLDSLKENDSLELHVNIRRAKSGDTITIKLPSKTSWRKKMENIEKQLADKSKELGREYFISELLFDILKENKWAKIRNNVILRSRYESEFDAVWSEQSKYYPILNHLETDRLQKILEFIFPGQKESQEKLRQTGLKEGLKYVIKNQVVFYQRELKDQSDLISNCRYEPTEKVVAKSHPVFQEYKIWEQINKLVINTKIENGVNRKGEIRYKYIDKPIPVALKEWLYEELQSKKEVSFNPILTKLKKEFKLRENVDFLNGMNAKDKLKGNETKVILQKALGELWNIFGLDDSERQVELWEILYNGKGNEYDLTSERTSNILAFIEKYSPDLENKNDVAIKISKIKFSRNYSNLSLKAIDNILPLVRAGKFFDQNFSEALSHKIVKLLNENVEDPFEKSAQEFLDKNQDVLSDGGIVNAIATILVYDKHTAKEYSGDELIKEFTQISRLKQGELRNPLAEQIINEALVIVRDIWRKYGFKPDEIRVELARELKNNAVERGKMYSANLKSQKHNAEIRNKLIELKQEISIANIEKYKLWVSQENLQEVYLKNYNDPSKSEIEKLKLWESQGHISPYTGQPISLSELFNRERYDVDHIIPQSRYFDDSLSNKVICEKSINNEKGNRTSMEYFEVGSVNYRIFTKDQFIDHANKYFSGKKRKNLLATSIPEDPIQRQIKDTQYISIRIREELNKIVGNENVKTTTGGITDYLRNHWGLTDKFKVLLKERYEAVLPKIAQLEYDNYKKETEKKFTEYKNADVEFNEPILDEEIFIEKFRSEFIRKKNNKLIIKGWSKRIDHRHHAMDALVIACTQPAHIKRLNDLNQVLKEWLDKNKEKFFPGFSGTKTELLDEVLNLEEEKRREIFNQLEKFRAIEMPWKGFPEEAEQKLKEVIVSHKPKDKLLLQYDIQGNKQIKLRGQLHEGTLYGLSNGKEIYRIPINKLAGKQFATEKTIEKIVNPFLKNVIEEHLKSFGKKEEAFSAEGILDLNKKLAERKDEQQNPKPHPPISTIKIYYKDPSKSKKKKTDDEDDISLQKLNRKKSFNDSLYVKTGDNYLFAVMEKEVFNKKLNKDKTERHYDLKLFLTLLIF

SEQ ID NO: 99 - protein, 1358 aa, Acidaminococcus sp.
MGKMYYLGLDIGTNSVGYAVTDPSYHLLKFKGEPMWGAHVFAAGNQSAERRSFRTSRRRLDRRQQRVKLVQEIFAPVISPIDPRFFIRLHESALWRDDVAETDKHIFFNDPTYTDKEYYSDYPTIHHLIVDLMESSEKHDPRLVYLAVAWLVAHRGHFLNEVDKDNIGDVLSFDAFYPEFLAFLSDNGVSPWVCESKALQATLLSRNSVNDKYKALKSLIFGSQKPEDNFDANISEDGLIQLLAGKKVKVNKLFPQESNDASFTLNDKEDAIEEILGTLTPDECEWIAHIRRLFDWAIMKHALKDGRTISESKVKLYEQHHHDLTQLKYFVKTYLAKEYDDIFRNVDSETTKNYVAYSYHVKEVKGTLPKNKATQEEFCKYVLGKVKNIECSEADKVDFDEMIQRLTDNSFMPKQVSGENRVIPYQLYYYELKTILNKAASYLPFLTQCGKDAISNQDKLLSIMTFRIPYFVGPLRKDNSEHAWLERKAGKIYPWNFNDKVDLDKSEEAFIRRMTNTCTYYPGEDVLPLDSLIYEKFMILNEINNIRIDGYPISVDVKQQVFGLFEKKRRVTVKDIQNLLLSLGALDKHGKLTGIDTTIHSNYNTYHHFKSLMERGVLTRDDVERIVERMTYSDDTKRVRLWLNNNYGTLTADDVKHISRLRKHDFGRLSKMFLTGLKGVHKETGERASILDFMWNTNDNLMQLLSECYTFSDEITKLQEAYYAKAQLSLNDFLDSMYISNAVKRPIYRTLAVVNDIRKACGTAPKRIFIEMARDGESKKKRSVTRREQIKNLYRSIRKDFQQEVDFLEKILENKSDGQLQSDALYLYFAQLGRDMYTGDPIKLEHIKDQSFYNIDHIYPQSMVKDDSLDNKVLVQSEINGEKSSRYPLDAAIRNKMKPLWDAYYNHGLISLKKYQRLTRSTPFTDDEKWDFINRQLVETRQSTKALAILLKRKFPDTEIVYSKAGLSSDFRHEFGLVKSRNINDLHHAKDAFLAIVTGNVYHERFNRRWFMVNQPYSVKTKTLFTHSIKNGNFVAWNGEEDLGRIVKMLKQNKNTIHFTRFSFDRKEGLFDIQPLKASTGLVPRKAGLDVVKYGGYDKSTAAYYLLVRFTLEDKKTQHKLMMIPVEGLYKARIDHDKEFLTDYAQTTISEILQKDKQKVINIMFPMGTRHIKLNSMISIDGFYLSIGGKSSKGKSVLCHAMVPLIVPHKIECYIKAMESFARKFKENNKLRIVEKFDKITVEDNLNLYELFLQKLQHNPYNKFFSTQFDVLTNGRSTFTKLSPEEQVQTLLNILSIFKTCRSSGCDLKSINGSAQAARIMISADLTGLSKKYSDIRLVEQSASGLFVSKSQNLLEYL

SEQ ID NO: 100 - protein, 653 aa, Oribacterium sinus
MELINSEEFTFKEELEKHTQVAMKQLSEFTYEDLEDSYFSVPVKRMIWQTLLVVREIEKVMGYAPKRIFVEMTRTEEEKGDKGRKESRGNQLLELYKSIKNTDSHNWKEEIAAADKDGKLRSKKLFLYYMQMGRDMYTGEEIDLGRLYDDNLYDIDHIYPRHYVKDDSIMNNLVLVNRRANQDIKKDLYPIPEQIKANPNVHMLWDALHKQKLITDEKYARLTSNTAFSEKQLGDFIARQLVETGQGTKGVADLLEQLFKDTVIVYAKASNVSDFRRDNGFLKSRLVNDFHHAQDAYLNIVVGNVYYTKFTKNPWNFICKDYEKDKEKNRYNLARMFDWNVVRGSETAWIVERKDEKGTISTVRKMMQKNTPLLTRMNFEQHGSIANATLYSAKKAKSENYLPLKTADEKMSDVKKYGGYTSMSIAYYFIVHHKEDKKENVTIEALPLYCKDKVEREENGLEKYCEEVLGYGEVNIIRRKLKIQSLLEFNGYQVHLSGKTGNQLILRNAISLCLSTKWITYIKKLEKAVNIQIVEEVVTPEENIKLYNLLADKHANTVYSKRPNAYGEKLLADREIFVTLEFGKQCEALLQILSLTKIGSTEANLLLIGESEHSGKILISKNLKASDRPAVINQSPCGLYEKKEWIFDKIVEK

SEQ ID NO: 101 - protein, 1436 aa, Capnocytophaga gingivalis
MKYIKYILGLDIGSNSIGWALIQLDLLQKTKRIIAAGSRIIPMDQKVLSDFGKGITISPTAQRTSYRNARHCRERHLLRRERLHRVLHILGFLPTHYDKQIDFSKRYGKFVDNTEPKIAYNEGKFLFMDSFQEMLSDFKSHQPDLFYTKKNGEESKIPYDWTIYYLRKKALSQKISKEELAWIILNFNQKRGYYQLREEEGNKENDFEIISSKIISVIKKDKDKKYNKYWYDIILENGLVYQAAFYNDFVYNWINQDREFIIERTSLKNGAEKVKLSYLPTFDEIDKMDKKEQDKYYKKIKIKTENSIGNKTVGCYIYDHILQNPNEKIKGKLVRTIERKYYKEELKAILEKQIALQPELFTDQLLADCIRELYSKNEAQQRNLAARDFVHLLVEDIIFYQRPLRRQKSTLANCSLESRSYIDKDSHTRKEAPLKVCPKSNPYYQEFRVLQWLQNLKIYEIDSDQEVTHQFIKTLEDKQQLFEFLMAQKEIDCEELLKYFLNQTYPNAKEKALKSELKKWKDTYRWNYVYDIGEKSSKKYPMNETRYELKRHLEKVANLPDDFLSSEVEYLLWHLIYSVKDKVAYEKGLKKFAQKHHLDKDSFVESFKKFNPYPSEYGSFSEKAIRKLLPLMRFGAHWDFNHIDKNTQKRIEDLITGVENEEIRTILREKAEKYQLEKETDFQDLPLWLAQYIVYNRHAEASSLEKWTSVNDLETYLNEFKQHSLRNPIVEQVVMETLRVVRDIWQQYGQGQASFFNEIHIELGRELKKTAKEREKLSKQNQKNEDINLSIKEKLKELEKYNTRAYSITHQEKYKLWLEQKHISPYTGQIISPENLFTDNYEIEHIIPQSRFFDDSLSNKVVCESIVNKAPYKDRQLGLEFIKNQGGRIVKELSKENKTIKIFTEEQYRTFIKEHYSNNPEKTKKLLLEEIPEKMVARQMNDTCYISKFISEILSKIVRSDEQDEGVHSKNVILCTGKITSILRQDWGLNDIWDNLILPRFERMNNLLQKEKFTIYSIEKQKKIPVVPINDQFKSFQKKRIDHRHHAMDAIIIACTTREHINYINNQHALEKEKDKKEKQEERDKLREKLCIKKYNNRSEGNYSWIFKKPWDTFTQEVRVALEDIVVSFKQNLRVINKATNYYERWVEENGKYIKKMVKQEGTNWAIRKPLHEETISGKIYLDREKITKNDILTATRKTVDSSFDDKRIKKITDTGIQKILLNYLKYKGSPEIAFSPEGLEELNKNLSIYNDGKPHKPIYKVRIYEKGSGRFALGEKGRKYKKYVQGASNLYFGIYQGAKRSFATIPLNEVIERQKQGLPSVPEYNEKGDLLLFSLSPNDLVYVPIEGEIIENIDFRNLSKEQKERIYNVNDFSSTCYFTPNRIAKAIFPKEVDLQRKGDKLSGSYDTKTASLEGIQIKEVCIKLKVDRLGNISKA

SEQ ID NO: 102 - protein, 1069 aa, Bacillus cereus
MNYDIGLRIGITSCGWSIINKDLERIEDLGVRVFEKAENPDGTASAAPRREARKSRRKHRRKKHRIERIKRLIVQHDLLSKKELDSLYLSPFNIDVWNLQVEALERKLDNREFARVLIHLVQRRGFQTIRKSVEIQEEGKLLENVSENERIMKVNGYKTVGEMFSKHEKFTHHKRNKDGSYTSVVTRSLLLKEIKTIFNSQRILGNVFSTQKLESDYLYIWGSQRPTLTYEQLMSMVGNCIYEKKEKRAPKTSWAFQYFSLLQKINKLKVSDDNTLRKLSKEERDIVIELAFKKKNVSFVDIRKALKLNDNTKFNHLTYSHVVETKKVEKATFIELKGYHLIKKQLKDRNVELTQELQPKDYDAIAAASTFFKNDIEFRDYLRNQYLDSNGKRKSNIANKVFEDKVIAAVFELNFSKVCHLSFKSLYKLIPHLEKGLDYKEAILCAGYNFRDENKRDKKLFLPVIQQETNPVVHRALTQARKVINAIIREYGSPNTIRFVVANDLAKTYKQRKELESTLKKNRAENEKIKTKLLSMGIINPTGMDIVKYKLWYEQSGICLYTGRQMELSSLFKPGYSIVNHIIPYNRSFDDTYHNRVLTLTETKYEKGNKIPFEYFGAEETCWNEYEKRVSTSKKIHDKKREKLLIRNFDIEYENEMISNNVFDTHYIGSYFEKYIDEHLQFKKSTKKQKVFSIHGNMVAHLHSRWGFNKNSREIYLNHAVDAAIVAVLTDQLIRNIADYYRRDNILEQKGSLKFPEPWKSFSIELEARISPQVRDLIKKLNLDSYLDVDILHIKPVFISKKPRRKVNGEAHKSTIRSLIGINEIGKTVTCIKTRLEDIPFDENGDFPMYGKDTDKYTYTAIKERYLEFNKDKEKAFSTPLYKLKRNGEPGNQIKSVKIIDTRNIVNKVNQGKGIAYNSNIIRVDVFSRDQKYYVVPIYLRDFIKGSLPNKIITAAKGFMQWPETDNSYTFLFSIFPNDLIKVVPKEGKFIKAKNENKENINLTEILGYFKGLDSSTGAFTLESHDGSLLARGIGTKNLLLIEKYQVDVLGRYNKVGNEERQDIKIQQN

SEQ ID NO: 103 - protein, 1391 aa, Lactobacillus jensenii
MKEIKDYIIGLDIGTNSCGYVVTDKQNNILKLKGKTAIGARLFKEGEAAADRRAFRTTRRRLARRRWRLSLLEEIFDEEMNKVDPSFFRRLKESDYSPKDRRKQFNSIVFESSEADKAFYEKYPTIYHLRNALMHDNQKHDLREIFLAVHHIVKYRGNFLREDSVKAFKAAKFTLQGEDGIGPVDKLNDLLKEIYIEAAPELATDNLSKIEDIIKDKKLYKQDKLKQIANLLPKAVDSKDKAKLNKDIAKQVANALMGYMFRLDTLFSFTDVDVKDYKLKFSDANIDESLDALTSLLTDAQIEFVLELQSIYNTIVLNEIVPDGMSLSESMVKKYDDHKKDLKLYKEYIDSLSDQKKAKQLEAAYALYVNYRKADLLAAKKLFEKKKIGDKKFVDVISNFEVFGKFVSDNLDDSELANKIKARLDLGEFLPKQRTNQNGVIPYQLHQVELTQILEKQGKYYPFLITPNPVESHRNNAPYEISELVSFRVPYYVGPLIDNQSIKDKQNKNKFAWMVRQKQGQITPWNFEEMVDTTESANQFIKRMTRKDTYLLAEDVLPKSSLIYQKFMILDELNRIKIDGKKLTSKLKHDIFEKLFKKQKSINLDNLKNYLLAEGNIPGLIEGLSDGINFNNSFSTYIDYRNIFGDEIDNPNKQADFEKMIEWSTVFEDRKIFKRKLKEITWLTPEQIKQVSSKRYSGWGRLSKKLLTQITDENGVNILQRLWNEPETLTEVLANPVIKRKISEANSLFVQINKVENILDDAYTSPQNKKAIRQVIRVVDDIIAAAHGKKPSQIAIEFARSSQNKAKVPDTRKKQLDKIYNKISSEILDSSIKNELKNLKSNKYLSKDKLFLYFKQMGRDAYTGDKLSLDQLQNYDIDHIFPRSFIKDDSLDNRVLTQKPINAKKSDYGIPALEFGNKYVPDLGITVKEMWKLWQENGLISKSKLINLCTNPKKIGSKRASGFINRQLVETSQVIKLVAIILQAEFPDTEIIEVKALQNTTLRESFHLYKNRSVNDYHHAIDAYLTTIVGNYLYQVYPKLRPYFVYGQFKKFNQEKNIDILKRLKNFNFLRQLIFNTDDNIYISGTKEIVFNKKDIIHKLETAYGYKYMNISRECYQETSSLFNQTLYAHNSSVKNSLIPKKKGLPTEIYGGYSGNKDSFFVLVKIVKKRTNLYRIVGIPTRELAKLNSSNNYNQALNKIVESKLCLKETESFKILIKRLLYGTLIVDNGQKFRIGSFKEKHNVQQLVLQLKSMKYIKFYIDGGQNYFTDVERKKLEKQDRDKCLLYVFDDIMNVVNKRFTLFDMSKYEKDGDSLREKFNCLDFNDKVSILSDLLKAFHANSDRTSITKLKITNLGRHQAGKNGITLTTNAQIIYQSPTGLFERRIKIKDL

SEQ ID NO: 104 - protein, 1114 aa, Eubacterium rectale
MNYTEKEKLFMKYILALDIGIASVGWAILDKESETVIEAGSNIFPEASAADNQLRRDMRGAKRNNRRLKTRINDFIKLWENNNLSIPQFKSTEIVGLKVRAITEEITLDELYLILYSYLKHRGISYLEDALDDTVSGSSAYANGLKLNAKELETHYPCEIQQERLNTIGKYRGQSQIINENGEVLDLSNVFTIGAYRKEIQRVFEIQKKYHPELTDEFCDGYMLIFNRKRKYYEGPGNEKSRTDYGRFTTKLDANGNYITEDNIFEKLIGKCSVYPDELRAAAASYTAQEYNVLNDLNNLTINGRKLEENEKHEIVERIKSSNTINMRKIISDCMGENIDDFAGARIDKSGKEIFHKFEVYNKMRKALLEIGIDISNYSREELDEIGYIMTINTDKEAMMEAFQKSWIDLSDDVKQCLINMRKTNGALFNKWQSFSLKIMNELIPEMYAQPKEQMTLLTEMGVTKGTQEEFAGLKYIPVDVVSEDIFNPVVRRSVRISFKILNAVLKKYKALDTIVIEMPRDRNSEEQKKRINDSQKLNEKEMEYIEKKLAVTYGIKLSPSDFSSQKQLSLKLKLWNEQDGICLYSGKTIDPNDIINNPQLFEIDHIIPRSISFDDARSNKVLVYRSENQKKGNQTPYYYLTHSHSEWSFEQYKATVMNLSKKKEYAISRKKIQNLLYSEDITKMDVLKGFINRNINDTSYASRLVLNTIQNFFMANEADTKVKVIKGSYTHQMRCNLKLDKNRDESYSHHAVDAMLIGYSELGYEAYHKLQGEFIDFETGEILRKDMWDENMSDEVYADYLYGKKWANIRNEVVKAEKNVKYWHYVMRKSNRGLCNQTIRGTREYDGKQYKINKLDIRTKEGIKVFAKLAFSKKDSDRERLLVYLNDRRTFDDLCKIYEDYSDAANPFVQYEKETGDIIRKYSKKHNGPRIDKLKYKDGEVGACIDISHKYGFEKGSKKVILESLVPYRMDVYYKEENHSYYLVGVKQSDIKFEKGRNVIDEEAYARILVNEKMIQPGQSRADLENLGFKFKLSFYKNDIIEYEKDGKIYTERLVSRTMPKQRNYIETKPIDKAKFEKQNLVGLGKTKFIKKYRYDILGNKYSCSEEKFTSFC

SEQ ID NO: 105 - protein, 1362 aa, Lactobacillus paracasei
MTKLGKPYGIGVDIGSNSIGFAAVDENSHLIRLKGKTVIGARLFEEGKAAAKRRAGRTTRRRLSRNRWRLSFLRDFFESHITPTDPNFFMRQKYSEISPKDKARYKYEKRLFNDRTDAEFYQQYSTMYHLRNRLMTDPSRADVREIYFAIHHILKSRGHFLTPGDAKDFNTNDVALDEIFPALQDAYAQVYPDLGITFDEDKANEFKTILLNEIATSIDTQRALVKLLLAEEDDKDILKQQKQVLTEFAKAVVGLKTKLNLALGTEVDSSEATAWNFSLGQLDDKWAGIESAMTDEGTEILDQIRDLYRARLLNGIVPTGKTLSQAKVDDYTQHHEDLQLFKAYLKQLEDDGTAKAIRQLYDRYIDGDDAAPFLRENFVKALTKDVTAHPNTKSPELLERLAQPDFMLKQRNKANGAIPVQMQQRELDQIIKNQAVYYDWLAAPNPVEKHRKSMPYQLDELLNFRIPYYVGPLVTAKEQKAAQGGVFAWMVRKDPEGNITPYNFDEKVDREASANTFIQRMKTTDTYLIGEDVLPKQSLLYQRYEVLNELNNVRVNNEKLSIEQKQQVIRELFERHNSVTIKQFAENLRAHGDYAHIPEIRGLADEKRFLSSLSTYRQLKSLLPEAIDDPAKQADIENIIAWSTVFEDAAIFKTKLKEISWLGSEAITKLSNIRYRGWGQFSRKFLNGLTLGNGHTIIQELLLSTNNLMQILTDETLQKKMTELNADKLKTANINDAIDNAYTSPSNKKALRQVLRVVDDIKRAADGQDPSWLYVETADGGGTPGKRTRARQHQLQEIYANAAHELIDTAVRGELEDKISDKADFNDRLVLYFMQGGRDIYTGAPLNIDQLSSYDIDHILPQSLIKDNSLDNRVLVHAIINREKNATFASTIYAQKMNATWRQWHEAGLISGRKLRNLQMRPDQIDKYASGFVARQLVETRQIIKLTEQIVAAQYPDTKIIAVKAGLSHQLREELEFPKNRDVNHYHHAFDAFLAARIGTYLLKRFPNLQAFFTYGKFTKADVKKLRGFNFIRDITHAEDKIVAKDTGEVVWDKQRDVDELDRIYNFKRMLITHEVRFETADLFKQTVYGARDSKEAGGSKQLIPKKKGYPVDIYGGYFRENTAYLAVVKVTKKTETIFKVVKIATSQVAALNKARSRSTAEELSVLTELLKPKFSKVGKNGKITDTPFEVVLPRVPREQLFYNAKYGFFMVNSDTMFHNFQEIWVSRSDQKILQQIRKAKIDYPNVDQDLDNLFHNLADQIVKYFDLYSIAGFKEKISQSQNTFNDLAVDDTDQSVGKITVINELLKGAQANGMTGSLKVLKISTPFGFTQDKSGVLTKDSSIIYQSPTGLFERSVRLTDL

SEQ ID NO: 106 - protein, 1056 aa, Actinobacillus minor
MKALNYILGLDLGIASVGWAVVEIDQNELPIRLIDLGVRTFERAEVPKTGDSLALARRLARSSRRLVRRRAVRLLKAKRLLKQEGILQADDFHSSHLKPLPNNPWELRVKGLNHLLDRKEWAAVLLHLLKHRGYLSQRKNESKTDNKELGALLKGVSENRQLLQAQAFSTPAEIAIKKFQQEEGHIRNQRGAYSHTFDRNDLLAELRLLFQKQREFNNPYTSQSLEQAIAELLMWQKPALSGEAILKMLGKCTFEPSEYKAPKNSYSAEYFVWLTKLNNLRILENGADRGLTAEERQLLINQPFEKAKFTYAQARKLLELSDLAIFKGVRYGKDNAESATLMEMKAWHAIRKALESNGLKTEWNGLKTKPELLDKIGTAFSIYKTDEDISQYLNGELSPAVLNALLENLSFDKFIRLSLQSLAKILPLMEQGLRYDEACKQVYGDHYGKKEQLELRFLPKIPVEDIRNPVVLRTLSQARKVINGVVRLYGSPARIHIETGREVGKSFSERRDISKRQEENRNERQRAVEKFKEFFPHFVGEPKAKDILKMRLYEQQHGKCLYSGKELDLNRLLEKGYVEIDHALPFSRTWDDSFNNKVLVLASENQNKGNQTPYEWLNGKENAERWKLFQALVNGSRFPYSKKQRILTKYLDEDGFRERNLNDTRYVARFLCNFIEDNMQLVGQGKKRVFASNGQITALLRRSWGIQKVREDNDRHHAVDAVVVACSTRALQKKITDYVRYKEMNVFTGEKIDQETGEIIKFHFPEPWKFFRQEVEIRVFSETPAEDVVIALPDRPQANHEFIQPLFVSRAPTRKMTGQGHMETIKSAKRLAEGLSVSRVPLTQLKLKDLENMVNREREKALYEALKVRLEKFNNDPAKAFADPFYKKGGQQVKAVRVEQVQKSGVLVRQENGVADNASMVRVDVFIKGGKYFLVPIYTWQVAKGILPNRAATQGKEEEYWDIMDETAIFQFSLYQNDLIKLVTKKKTIFGYFNGLNRATSNINIKEHDLDKSKGKDGIYLEVGVKLALSLEKYQVDELGKNIQPCRSMKKRPPVR

SEQ ID NO: 107 - protein, 1081 aa, Neisseria flavescens
MTAFKPNPINYILGLDIGIASVGWAMVEIDEEENPIRLIDLGVRVFERAEVPKTGDSLAAARRLARSVRRLTRRRAHRLLRARRLLKREGVLQAADFDENGLIKSLPNTPWQLRAAALDRKLTPLEWSAVLLHLIKHRGYLSQRKNEGETADKELGALLKGVADNAHALQTGDFRTPAELAVNKFEKESGHIRNQRGDYSHTFSRKDLQAELVLLFEKQKEFGNPHISDGLKEGIETLLMAQRPALSGDAVQKMLGYCTFEPTEPKAAKNTYTAERFIWLTKLNNLRILEQGSERPLTDTERATLIDMPYKNKLTYAKARELLGLDDTAFFKGLRYGKDNAESATLMEMKAYHAIRRALEKEGLKDKKSPLSLSPELQDEIGTAFSLFKTDEDITGRLKGCLQPEILDALLKHINFDKFVQISLKALRRIVPLMEQGKRYDEACAETYGDHYGEKNSEEMLYLPPIPADEIRNPVVLRALSQARKVINGVVRRYGSPARIHIETAREVGKSFKDRKEIEKRQEENRKDREKAAAKFREYFPNFVGEPKSKDILKLRLYEQQHGKCLYSGKAIDIRRLNGKGYVEIDHALPFSRTWDDSFNNKVLVLGSENQNKGNRTPYEYLNGKDNSREWLEFKARVETSRFPHSKKQRVLLQKFDEKGFKERNLNDTRYVNRFLCQFVADHMQLTGKGKRRVFASNGQITNLLRGFWGLHKVRAENDRHHALDAVVVACSTVAMQQKITCFVRYKEMNAFDGKTVDKETGEVLHQKTHFPQPWEFFAQEVMIRVFGKPDGKPEFEEADTPEKLRALLAEKLSSRPEAVHEYVTPLFVSRAPNRKMSGAHKDTLRSAKRFVKHNEKISVKRVWLTEIKLADLENMVNYKNGREIELYEALKARLGAYGGNAKQAFDPKDNPFYKKGGQLVKAVRVEKTQESGVLLNKKNAYTIADNGDMVRVDVFCKVDKKGKNQYFIVPIYAWQVAENILPDIDCKGYRIDDSYTFCFSLHKYDLIAFQKDEKSKVEFAYYINCDSSNGRFYLAWHDKGSKEQQFRISTQNLVLMQKYQIDELGKEIRPCRLKKRPPVR

SEQ ID NO: 108 - protein, 1392 aa, Gemella haemolysans
MANKTWYLGLDIGSASVGWAATDTGYKIIRKNKKRLWGVRLFEEAKTAEDRRGYRSSRRRLARRKWRLNLLEELFTSEVKKVDENFFLRLKESQYHYEDKTHKVPYAIFNDKDYTDKDYYKDYPTIYHLRSKLMTEENPDIRKVFLAIHHIIKNRGHFLLQGQSFKDGNLNNLIKELLELDILHVGFEVTEEVVDKIADISLEKKTSKDKLNDIKELYPKEKQLLEVFRLIFGGKTSLDKLFAIDEYKELDAAIKSVSFKEKIYEEVRHDYEQVLSNYIELLDLAKLVYDSIILSDIKKEGKTLSESKVELFEKHRDDLLKLKNLVKNDSKLSEDKKVELYALIFKEDKDKGTNYVNYIRKSEEGKGCNYEDFKKFLVKELAKLEESSVKTEIIKDLELEQFLPLQRTKDNSVVPYQIHKEELVKILDNAARYHSFLNEKDESGYNVREKVIQLLEFRIPYYVGPLNSSKKAKEGGFAWSVRNTGYENTPVTPWNYSKVIDESASAEKFITNLTNKCTYLKGEDVLPKSSLLYSEFALLNELNALKYDGNRISLEARNTIIEKLFKQQGKKVTKTSIKNLLKAEGYIDGKGEITGIDITVKNDLKSYRDFKKILGNKFNSEHVENIILWITLYGESRKLIKAKIESVYGEVYSKDEITKMSRLVYKDWGRFSRKLLTELVSKKLYNEETGECLNIIGAMRQNNILFMELLADRFDYSKQIVEFNKELQEDVTEIAPEILDDLYVSPAVKRSIWQTVRIVEELKKIIGCAPAKIFVETTRSNQEKKKPTDSRKKQLELAYKAVKKDVKELEKEIGTINFDVLNDRLSSVEPSKLKAKKLYLYYTQLGRCMYSEEPINISELFDNNKYDIDHIYPQSKIKDDSFTNTVLVKRESNAAKTDRYPLGSDIQTPSNRRFWKFLKEKGLISDEKYNRLVRTEEFSDEELSGFIARQLVETSQSVKAVASILGELNPETSICYSKAENVSSFRQNFGKIKKGDRDSKNNDQLIKVREINDYHHAKDAYLNVVVGNVYDTKFTRNVFNFIKDKKDGRKYSLNKVFYENVSDSKTVAWEMDKTIHQVEKVMNNNNIMVTRRTSEQKGGLFDATVYKAKVAAKAKDGVYYPLKTSNSVVKDVAKYGGYTSIGIAYYSIFEYTIVNKKGEEKITRIIPIPIYISQNIKDSTALIEFGKSQIFCRAYEKIKDFKLLYRKLCIGSKININNYQYYIGGKSDERFYYDSAIQVTLDKKSEKYLKILSKYQNWKKENKDGELWENITKENNIELYNKLVEKMNSEIFTKKKSNKYNELNSEEIRNNFIKISVEEQAKVLLEILNLLTNKKSIFDLKSIDIKAARGKISFNLTSLIQFSIIEQSITGFYEKEITIIGDKGNDMENNNS

SEQ ID NO: 109 - protein, 702 aa, Helicobacter pullorum
MRKILKIDERIQFKEVDYTAKNPENKKFVEFKNLKKFCEILGAIVGDRALADSIARDMTLIKDEEELAQKLRGYGKFSQEQITQLSALHFSHHISLSLKALSEILPFMREGMRYDEACQEAKLQAKHNDKKSKFLPPFCESIYADELTNPVVHRAIAEYRKILNALIAKYGSVHKIHIELTRDVGKNFQEREKYKKEIESNYKARVQAMQECEKLGLTLSEGNILKLRLFREQNEICVYSGRKITLANLKEQGALEIDHILPYSRSSDDSYMNKVLVFTNENQNKGNKTPYEAFGGDSQKWGEIESLALRSGYPKKKAKRILDKGFGDREAGFKSRNIVDSGYIARLIANYTKEYLKFLPLDSHENTALIAGEKDSKIHVEAVKGMLTATMRHFWGLGSKNRYEHTHHAVDAIIIAYINAAMIQRFSQFRQNQESLKARFYAKELAKEEFKTQRAFFEPFSGFREQVLAKVGQIFVSRPPRKRARGALHEETFYSIDDKKLSETYGGKKGVQRALSLGKIRQIGTKIVANGPMVRVDIFKHTQSGRFYAVPIYTMDFALGILPNKAVVSGKDKDRIIKDWLEMDSCYEFCFSLFKDDVIEVQKRDMEKPELAYFVSLDASDGRIKVRHHCNDITKINENQKKLFSEAIEKEVVGRGSIQNLKVFKKYKVSPLGEIKEAKYEPRQPIALKTSPKKHRKQNNAQ

SEQ ID NO: 110 - protein, 1371 aa, Streptococcus dysgalactiae
MDKKYSIGLDIGTNSVGWAVITDDYKVPSKKFKVLGNTDRHSIKKNLIGALLFDSGETAEATRLKRTARRRYTRRKNRIRYLQEIFSSEMSKVDDSFFHRLEESFLVEEDKKHERHPIFGNIVDEVAYHEKYPTIYHLRKKLADSTDKADLRLIYLALAHMIKFRGHFLIEGDLNPDNSDMDKLFIQLVQTYNQLFEENPINASRVDAKAILSARLSKSRRLENLIAQLPGEKRNGLFGNLIALSLGLTPNFKSNFDLAEDAKLQLSKDTYDDDLDNLLAQIGDQYADLFLAAKNLSDAILLSDILRVNSEITKAPLSASMIKRYDEHHQDLTLLKALVRQQLPEKYKEIFFDQSKNGYAGYIDGGASQEEFYKFIKPILEKMDGTEELLAKLNREDLLRKQRTFDNGSIPHQIHLGELHAILRRQEDFYPFLKDNREKIEKILTFRIPYYVGPLARGNSRFAWMTRKSEETITPWNFEEVVDKGASAQSFIERMTNFDKNLPNEKVLPKHSLLYEYFTVYNELTKVKYVTEGMRKPEFLSGKQKEAIVDLLFKTNRKVTVKQLKEDYFKKIECFDSVEISGVEDRFNASLGTYHDLLKIIKDKDFLDNEENEDILEDIVLTLTLFEDKEMIEERLKKYANLFDDKVMKQLKRRHYTGWGRLSRKLINGIRDKQSGKTILDFLKSDGFANRNFMQLINDDSLTFKEAIQKAQVSGQGHSLHEQIANLAGSPAIKKGILQSVKVVDELVKVMGHKPENIVIEMARENQTTQKGQKNSRERMKRIEEGIKELGSQILKEHPVENTQLQNEKLYLYYLQNGRDMYVDQELDINRLSDYDVDHIVPQSFIKDDSIDNKILTRSDKNRGKSDNVPSEEVVKKMKNYWRQLLNAKLITQRKFDNLTKAERGGLSELDKAGFIKRQLVETRQITKHVAQILDSRMNTKYDENDKLIREVKVITLKSKLVSDFRKDFQFYKVREINNYHHAHDAYLNAVVGTALIKKYTKLESEFVYGDYKVYDVRKMIAKSEQEIGKATAKRFFYSNIMNFFKTEITLANGEIRKRPLIETNEETGEIVWDKGRDFATVRKVLSMPQVNIVKKTEVQTGALTNESIYARGSFDKLISRKHRFESSKYGGFGSPTVTYSVLVVAKSKVQDGKVKKIKTGKELIGMTLLDKLVFEKNPLKFIEDKGYGNVQIDKCIKLPKYSLFEFENGTRRMLASVMANNNSRGDLQKANEMFLPAKLVTLLYHAHKIESSKELEHEAYILDHYNDLYQLLSYIERFASLYVDVEKNISKVKELFSNIESYSISEICSSVINLLTLTASGAPADFKFLGTTIPRKRYGSPQSILSSTLIHQSITGLYETRIDLSQLGGD

SEQ ID NO: 111 - protein, 1007 aa, Helicobacter canadensis
MKVLGFDIGINSIGWAFVENNELKDCGVRLFTKAENPKTKESLALPRRNARSSRVRLRRRRSRLLSLKHIISKEFGLHYEDYIALDGNLPKAYTGKIESIYKLRYEALSQAISKEDLARVILHIAKHRGYMNKNQKTSQDSEKGAILSAIKENSNKIKHYQTAGEYFYKELFENLRDGTKEFKNIRNKAMKNEKTGNMESTYYNTILASDLEKELKLILEKQQAYHNYSDTFIKEVLEIAFYQRPLKDFSHLVGSCTFYENEKRACKNSYSAWEFIALGKIINTLESIKKDTGEIFSNEIITQILKEVLDKGSLSYTKLRKMINLDEKVKFKGLKYDKEGVEKTNLIEFKKLKEFKKALGEHNLERKTLDEIATHITLTKDENQLKKQLEQYALSQNQIDALAELDFNDHINLSFKALYEILPLMEKGKRYDEACNELGLKAKTSNQKSEFLPAFCDSIFAQELTNPIVNRAISEYRKVLNRLLKKYGKMHKIHIELARDAGLSKEARNKIEKEQKENKDINDKAEKTCKEFGLKPNAKNILKIKLWREQGEICAYSGKKITIDDLKEDKALEVDHIYPYSRSYDDSYNNKVLVFIKENQLKLNQTPYEAFGSNQEKWSKIQVLAQKLPYKKKNRILDENFKNKDQIEFISRNLNDTRYATSLIAKYTKEYLEFLPLSDDEDISLKSGEKGSKTHVQTMNGMLTSVLRHAWGFSQKDRNNHLHHALDAIIIAYSTNSIIKAFSDFKKNQEILKAKLYAKKLTSEEYKNQSKFTGFEKYRSKILEKLDSIFVSKPPNKNTKGALHEQTFYSYQDILEEYKTQEGLKRALECGKVRKIGTKYVVNDRMVRLDIFKKDNKFYGIPIYTMDFALGVLPNKVVTIGTDKDKIKKEWKTIDETYEFCFSLYKGDLVLIQKKEMQESEFAYYNGFDISSASISLEKHDNKFENLTENQKLLFPKAKEGDVEVRGIGIQGLKVFKKYMVTPLGEIQETRTEARQNIQPRKKHGLR

SEQ ID NO: 112 - protein, 1397 aa, gamma proteobacterium
MTKNYISPIAIDLGAKFTGVALYQYLEGADCTQEVAKGLLVDDRGNVTWSQEGRRGKRHQVRGYKRRKMAKRLLWLILDSEYGIKREEVTEPLLKFINGLLNRRGYTYISEEVDEESMNVSPLPFSEMMPDYFNSSAPLLEQLAKLLSDKNKLVRFRAEGKIPSNKNEFKKLLDTALDGKYKDEKKELSEAWGNILIASENVLKSTVDGHKSRSEYLANIKEDIKSNEELEKQISSKEIDGFYNLVGHLSNFQLRLLRKYFNDPNMSGVSYWDEKRLEKYFYQWVQGWHTKGGTDEAEKKNIILKTKGAPLLKTLKSLSADLTIPPYEDQNNRRPPKCQSVLLSDEKLTMHYPKWKEWVGQLVKQNDNAYLNENVTLANALHRIVERSRSIDPYQLRLLISITDAEKRNDLAGYKRLKLSLGSEVDEFLLLVKNIVDETKEAREGLWFETENKLFFKCGKTPPRKEKLKSTLLSAVLGKNLSDDEQSSFIEEFWKSGTPKIERRNVRGWCRLASQVQKTYGVYLKEYGLQQLHKLEAGKKLDDKPLALLYKNSGLIASKIGEALNIEPDEVSRFASPHSLAQIFNIIEGDVAGFNKTCRACTYENIWRMQEEKVESLLTNQLLSEIHGERKVPLKSAMCTRLSADSTRPFDGQMASIIEHIARKIAQHKIAQINDVPKEFSIDIPIIIESNQFSFTAELEEIKRGRGSAKAKKAKELGEKSKAGWVSKTERIKTSSEGICPYTGAPLGGSGEIDHIIPRSLTGRTKKTVFNSEANLIYCSSKGNHDKGNRVYVIEQLNDKYLKKQFSTSDVNLIKKKIKTTIQRFTEGGEKLRSFSELSREDQKAFRHALFVPELKSEVTSLLAVKNITRVNGTQAWLAKKIASLLAEHLDKQGRDYTLSAHQIDPWSVSKQRKMLASAEPIWAKKDPQPAASHVVDAVCTFLEALEQPHTASRLKTISSTSFEKTGWRSALIPDLIKVDALDRRPKYRRYNIGSTSLFKDGIYAERFLPILIDENGLMAGYDIDNSLKAKGADVVFESLSPFLLFKGEEVGAQSLSDWQERIDGRYLYMSIDKVKAFDYLQEKVGEKDIAAELLNSIHFTQRKTELRAKFSDDSGKKMKTLDAIRKSLKLTVTVNEIGKRKEKCGFSGTIGIPAKSAWENLLDEPLLETYWGTKMPPQEIWEKVYRKHFPRNIPNQAHRKVRKDFSLPVVDSVSGGFRVKRKTPNGYNYQLLAIDGYSAVGFKKEGDNVDFKSPALVPQIAESKSVTPISSELVHLDKNEIVYFDEWRKIDISDSDLKQFVSSLELAPGSQNRFYIRFTVDEDQFERHFKSALRVNGIQDLDTVNKTFDWNREIPSLLIPPRSNLFLLETGQKITFEYIANGANAEVKKAYSLRRA

SEQ ID NO: 113 - protein, 1082 aa, Neisseria meningitidis
MAAFKPNPINYILGLDIGIASVGWAMVEIDEEENPIRLIDLGVRVFERAEVPKTGDSLAMVRRLARSVRRLTRRRAHRLLRARRLLKREGVLQAADFDENGLIKSLPNTPWQLRAAALDRKLTPLEWSAVLLHLIKHRGYLSQRKNEGETADKELGALLKGVADNAHALQTGDFRTPAELALNKFEKESGHIRNQRGDYSHTFSRKDLQAELILLFEKQKEFGNPHISGGLKEGIETLLMTQRPALSGDAVQKMLGHCTFEPAEPKAAKNTYTAERFIWLTKLNNLRILEQGSERPLTDTERATLMDEPYRKSKLTYAQARKLLGLEDTAFFKGLRYGKDNAEASTLMEMKAYHAISRALEKEGLKDKKSPLNLSPELQDEIGTAFSLFKTDEDITGRLKDRIQPEILEALLKHISFDKFVQISLKALRRIVPLMEQGKRYDEACAEIYGDHYGKKNTEEKIYLPPIPADEIRNPVVLRALSQARKVINGVVRRYGSPARIHIETAREVGKSFKDRKEIEKRQEENRKDREKAAAKFREYFPNFVGEPKSKDILKLRLYEQQHGKCLYSGKEINLGRLNEKGYVEIDHALPFSRTWDDSFNNKVLVLGSENQNKGNQTPYEYFNGKDNSREWQEFKARVETSRFPRSKKQRILLQKFDEDGFKERNLNDTRYVNRFLCQFVADRMRLTGKGKKRVFASNGQITNLLRGFWGLRKVRAENDRHHALDAVVVACSTVAMQQKITRFVRYKEMNAFDGKTIDKETGEVLHQKTHFPQPWEFFAQEVMIRVFGKPDGKPEFEEADTPEKLRTLLAEKLSSRPEAVHEYVTPLFVSRAPNRKMSGQGHMETVKSAKRLDEGVSVLRVPLTQLKLKDLEKMVNREREPKLYEALKARLEAHKDDPAKAFAEPFYKYDKAGNRTQQVKAVRVEQVQKTGVWVRNHNGIADNATMVRVDVFEKGDKYYLVPIYSWQVAKGILPDRAVVQGKDEEDWQLIDDSFNFKFSLHPNDLVEVITKKARMFGYFASCHRGTGNINIRIHDLDHKIGKNGILEGIGVKTALSFQKYQIDELGKEIRPCRLKKRPPVR

SEQ ID NO: 114 - protein, 1334 aa, Listeria monocytogenes
MKKPYTIGLDIGTNSVGWAVLTDQYDLVKRKMKISGDSEKKQIKKNFWGVRLFEKGETAAKRRMSRTARRRIERRRNRISYLQEIFAIQMNEVDDNFFNRLKESFYAESDKKYNRHPFFGTVEEEVAYYKDFPTIYHLRKELIDSQKKADLRLVYLALAHIIKYRGHFLIEGALDTKNTSIDEMFKQFLQIYNQVFANDIEEASLKKTEKNQEVAQILAEKFTRKDKLDKILSLYPGEKTTGVFAQFVNIIVGSTGKFKKHFNLHEKKDINCAEDTYDTDLESLLAIIGDEFAEVFVAAKNAYNAVVLSNIITVTDSTTRAKLSASLIERFENHKEDLKKMKRFVRTYLPEKYDEIFDDTEKHGYAGYISGKTKQADFYKYMKATLEKIEGADYFIAKIEEENFLRKQRTFDNGVIPHQLHLEELEAILHQQAKYYPFLREDYEKIKSLVTFRIPYFVGPLAKGQSEFAWLTRKADGEIRPWNIEEKVDFGKSAVDFIEKMTNKDTYLPKENVLPKHSLCYQKYMVYNELTKVRYIDDQGKTNYFSGQEKQQIFNDLFKQKRKVKKKDLELFLRNINQIESPTIEGLEDSFNASYATYHDLLKVGMKQEILDNPLNTEMLEDIVKILTVFEDKRMIKEQLQQFSDVLDGTVLKKLERRHYTGWGRLSAKLLVGIRDKQSHLTILDYLMNDDGLNRNLMQLINDSNLSFKSIIEKEQVSTTDKDLQSIVAELAGSPAIKKGILQSLKIVDELVSVMGYPPQTIVVEMARENQTTNKGKNNSKPRYKSLEKAIKEFGSQILKEHPTDNQELKNNRLYLYYLQNGKDMYTGQELDIHNLSNYDIDHIVPQSFITDNSVDNLVLTSSAGNREKGDNVPPLEIVQKRKIFWEKLYQGNLMSKRKFDYLTKAERGGLTEADKARFIHRQLVETRQITKNVANILHQRFNYKTDGNKDTMETVRIVTLKSALVSQFRKQFQFYKVREVNDYHHAHDAYLNGVVANTLLKVYPQLEPEFVYGEYHQFGWFKANKATAKKQFYTNIMLFFAQKDRIIDENGEILWDKRYLETVKKVLGYRQMNIVKKTEIQKGEFSNVTPNPKGKSNKLIPRKKDWDPIKYGGFDGSKMAYAIIIEYEKQKRKVRIEKKLIQINIMEREAFEKDEKTFLEEKGYHQPKVLIKVPKYTLYECKNGRRRMLGSANEAHKGNQMLLPNHLMALLYHAEKYEAIDGESLAYIEVHRALFDELLAYISEFARKYTLSNDRLDEINMLYERNKDGDVKSIAESFVSLKKFNAFGVHQDFSFFGTKIERKRDRKLNELLNSTIIYQSITGLYESRKRLDN

SEQ ID NO: 115 - protein, 1337 aa, Enterococcus faecalis
MKKDYVIGLDIGTNSVGWAVMTEDYQLVKKKMPIYGNTEKKKIKKNFWGVRLFEEGHTAEDRRLKRTARRRISRRRNRLRYLQAFFEEAMTALDENFFARLQESFLVPEDKKWHRHPIFAKLEDEVAYHETYPTIYHLRKKLADSSEQADLRLIYLALAHIVKYRGHFLIEGKLSTENISVKEQFQQFMIIYNQTFVNGESRLVSAPLPESVLIEEELTEKASRTKKSEKVLQQFPQEKANGLFGQFLKLMVGNKADFKKVFGLEEEAKITYASESYEEDLEGILAKVGDEYSDVFLAAKNVYDAVELSTILADSDKKSHAKLSSSMIVRFTEHQEDLKKFKRFIRENCPDEYDNLFKNEQKDGYAGYIAHAGKVSQLKFYQYVKKIIQDIAGAEYFLEKIAQENFLRKQRTFDNGVIPHQIHLAELQAIIHRQAAYYPFLKENQEKIEQLVTFRIPYYIGPLSKGDASTFAWLKRQSEEPIRPWNLQETVDLDQSATAFIERMTNFDTYLSSEKVLPKHSLLYEKFMVFNELTKISYTDDRGIKANFSGKEKEKIFDYLFKTRRKVKKKDIIQFYRNEYNTEIVTLSGLEEDQFNASFSTYQDLLKCGLTRAELDHPDNAEKLEDIIKILTIFEDRQRIRTQLSTFKGQFSAEVLKKLERKHYTGWGRLSKKLINGIYDKESGKTILGYLIKDDGVSKHYNRNFMQLINDSQLSFKNAIQKAQSSEHEETLSETVNELAGSPAIKKGIYQSLKIVDELVAIMGYAPKRIVVEMARENQTTSTGKRRSIQRLKIVEKAMAEIGSNLLKEQPTTNEQLRDTRLFLYYMQNGKDMYTGDELSLHRLSHYDIDHIIPQSFMKDDSLDNLVLVGSTENRGKSDDVPSKEVVKDMKAYWEKLYAAGLISQRKFQRLTKGEQGGLTLEDKAHFIQRQLVETRQITKNVAGILDQRYNANSKEKKVQIITLKASLTSQFRSIFGLYKVREVNDYHHGQDAYLNCVVATTLLKVYPNLAPEFVYGEYPKFQAFKENKATAKAIIYTNLLRFFTEDEPRFTKDGEILWSNSYLKTIKKELNYHQMNIVKKVEVQKGGFSKESIKPKGPSNKLIPVKNGLDPQKYGGFDSPVVAYTVLFTHEKGKKPLIKQEILGITIMEKTRFEQNPILFLEEKGFLRPRVLMKLPKYTLYEFPEGRRRLLASAKEAQKGNQMVLPEHLLTLLYHAKQCLLPNQSESLAYVEQHQPEFQEILERVVDFAEVHTLAKSKVQQIVKLFEANQTADVKEIAASFIQLMQFNAMGAPSTFKFFQKDIERARYTSIKEIFDATIIYQSTTGLYETRRKVVD

SEQ ID NO: 116 - protein, 1426 aa, Capnocytophaga ochracea
MKNILGLDLGTTSIGFAHIVEDENKEKSEIKELGVRIVSLTTDEQSDFEKGKSITTNANRTLKHGARLNLDRYQQRRKYLIDLLQKANLITPSSILAENGKNTTHSTWQLRAKAVTERIEKEEFARILLAINKKRGYKSSRKAKTEDEGQAIDGMAIAKRLYDENLTPGQLSLQLLQQNKKLLPDFYRSDLQKEFDLVWNFQKQFYPDILTDIFYKELQGKGKDATSKAFSKRYHFDTTENKGSKESVRLQAYQWRAEAISKQLSKEEVAYVLTEINNNLNNASGYLGAISDRSKELYFNRQTVGQYLYAKLQENRHNSLKNKVFYRQDYLDEFERIWETQASFHKELTDELKKQIRDVVIFYQRKPKSQKGLISFCEFESKEIEIEKDGKTITKNIGARVVPKSSPLFQEFKIWQILNNVICKRKGIRKKKISAKTTQLDLLNESSQTIFSLDMECKQLLFDELNLKGDLKSDKVLKLLGYSPQEWEINYNQLEGNRTQKALYEAYLKIVEMEAHDVKDILQIKSAKDDWSLDESPLSASEIREKVKAIFQTLGICTKILYFDPLLPVKEFEEQDSYQLWHLLYSYESDDSTSGNETLYRILEKKYAFKREHARILANVALQDDYGSLSTKAIRKIYPNIKENQYSTACEKAGYKHSKLSLTTEELEARELKNIIPLLKKNALRNPVVEKILNQMINVVNALIEKNSERDAEGKITKYFHFDEIRIELARELKKNAQKRYEMTQNINKAKLEHQKISEILQKEFGIKNPTKSDIIRYRLYQELEHNGYKELYTNAPIARDMLFSKNIEIEHIVPKARVFDDSFSNKTLTFHRINSDKGEYTAFDYITSLNSEEELNQYLTRVENAYKTKSISPTKYKNLLKKASEIGDDFINRDLRDTQYIAKKAKEILFQVTKNVLSTSGSITDRLREDWGLVDVMKELNMPKYQSLGLTEVEERKDGNKVTVIKNWTKRNDHRHHAMDALTVAFTKPSYIQYLNHLNARKDENNKNYSVILAIEEKETIKVPTNNGKNKRVFIEPIPNFRQVAKKHLEEIFISHKAKNKVVTKNTNKPAGTDKQQITLTPRGQLHKETIYGKYQYYINKEEKIGVKFDERTIAKVSNPVYREALLKRLQANDNDPKKAFAGKNALSKNPIYLDESKTKTLPEKVNLTYLEEDFSIRKDISPDNFKDLKSIEKVIDQGVKRILIKRLQAYDNDPKKAFVDLEKNPIWLNKEKGIAIKRVTISGVNNAQPLHIGKDHLGKTTLNKEGKEIPVDYVSTGNNHHVAIYRDKEGNLQEQIVSFFDAVVRAQQGIPIIDKTYKQAEGWQFLFTMKQNEMFVFPNATTGFNPAEIDLLDPKNKKLISPNLFRVQKIATKDYFFRHHLETNVETDNILKNVTWKREGLSGLKDIVKVRINHLGDIVSIGEY

SEQ ID NO: 117 - protein, 1424 aa, Parabacteroides sp.
MKRILGLDLGTNSIGWALVNEAETDEEVSSIIRLGVRVNPLTVDETQNFEKGKSITTNAERTLKRSMRRNLQRYKLRRDALVEFLKELGFITDETILSEQGNRTTFETCRLRAKAAEEEISLEELSRVLLMINKKRGYKSSRKVKKEEDGVLIDGMEIAKKLYEEDLTPGQLCSQLLESGKKVLPDFYRSDLQEELDRIWSVQKQFHPDVFCDAAKEEIKGKNRSQTWAILANYFVWKEEVVGWNDREAKNETIEKECKLVGLKRTTKGYELKKENYRWRAQALTEQLGLEEIAVVLQEINGQINASSGYLGAISDRSKVLYFNHQTVGQYQMAELDKNPHASLRNMVFYRQDYLDEFDRIWEKQAEFHKELTAELKKEIRDMIIFYQRRLKSQKGLISFCEFERLEIVVEKDGKKQTKVIGCKVIPRSHPLFQEFKVWQTLNDIKVLGREKKRNALSASESRALYPEEKEILARELAIKENMKKADVLKLLFENPQELDLNFKQIDGNRTGFSLFSAYSKMIEKYGYEPLDFKKPADEIIGQLRTIFTDLGWNTNLFTIDLTKEGKELEMQPYFRLWHLLYSFEGDNTSTGNGKLIEKIMQLCGVEKEYAVELASLSFQDDYGSLSAKAIKRILPYLKEGNLYDVACEYAGYRHSKSSLTKEEIENKVLKGKLEVLPKNSLRNPVVEKILSQMVNVINTIIDTYGKPDEIRVELARELKKSAKEREELTKAIAKSTREHEEIRKLLQDEFGMMNVSRNDIIRYKLYEELKDNGYKTLYSNQYIPKEKIFSKEIDIEHIIPQSRLFDDSLSNKTLEYKAINIEKGNKTAYDFVKEKYGEEGLQQYINRCESLFNDKKAKLRKLKMEQKDIPDGFIDRDLRNTQYIAKKALAMLNEICRRVVATTGSITDQLREDWQLVDVMKELNLPKYEALGFVETYEDKDGRKIKRIKDWTKRNDHRHHAMDALTVAFTKDAFIQYFNNKNAAQDSGNRNHTNIIGIKTRYFDKGRALPPIPLEQFRIEAKQHLEKLLVSIKAKNKVVTVNVNRTKKRKGENTKIQQTPRGQLHLETVYGSHKQYVTKIEKVNASFDAAKIATVSKRAYRNALLKRLETFGNDPKKAFTGKNALEKNPLYADKYQTIRVPEKVQTVEFETIYTIRKPVDPALNVDKVVDVKVRAILERRLKEYGGDPKKAFVNFWENPIWLNKEKGISIKRVSIRGINNAQSIHVKKDKNGNPIWDENGKQIPVDFVNTGNNHHVAIYRKPVLDKKGQVTFDEDGNLMYELDEVVVPFFEAVTRANLGLPIIDKDYRKSEGWQFLFSMKQNEYFVFPNEKTGFNPKEVDLLNPDNYAMISPNLFRVQTMSKVMYGNNVVRDYKFRHHLETTVKDMKELKDIAYKQYKTLSFGNSVVKIRINHIGQIVSVGEY

SEQ ID NO: 118 - protein, 1395 aa, Lactobacillus jensenii
MKEIKDYIIGLDIGTNSCGYVVTDKQNNILKLKGKTAIGARLFKEGQAAADRRSFRTTRRRLARRHWRLGLLEEIFDPEMEKIDPNFFRRLKESDYSPKDSRKQFNAIVFKSIKADKRFYKKYPTIYHLRNALMHDNQKHDLREIFMAVHHIVKYRGNFLREDSVNAFKAAKFSLRGEDGIGPVDKLNDLLKEIYSEYSPELATNNLSKIEDIIKDKNLYKQDKLKQVATLLIKEADSKDKAKLNKDIAKQVANSFMGYMFRLDTLFSLTDVDVKDYKLKFSDANIDESLDDLTSLLTDAQIEFVLELQSIYNTIVLNEIVPDGMSLSESMIKKYDDHKEDLKIFKEYIDSLSDQKKAKKLLSAYNLYVNYRKSDLVEAKNLFKNKKVGDKNFADVISNFEVFGKFVSDNLDDSELANKIKARLDLGEFLPKQRTNQNGVIPYQLHQVELTQILEKQGKYYPFLITPNPVESHRNNAPYEISELVSFRVPYYVGPLIDNQSIKDKQNKNKFAWMVRQKQGQITPWNLEEMVDTTESANQFIKRMTRKDTYLLAEDVLPKSSLVYQKFMILDELNRIKIDGKKLTSELKHDIFEKLFKKQKSINLDNLKNYLLVEGNIPGLIEGLSDGINFNNSFSTYIDYRNIFGDEIDNPNKQADFEKMIEWSTVFEDRKIFKRKLKEITWLTSEQIKQVSSKRYSGWGRLSKKLLTQITDENGVNILQRLWNEPETLTEVLANPVIKRKIVEANSSFTKAKDMKDILVEAYTSPQNKKAIRQVMRVVDDIIAAAHGKKPSQIAIEFAREDQDNPQMTKSRKAQLDQIYAKISDEFLDDAVKNELKNMKDNKPLAKDKVFLYFKQMGRDAYSGEKLSLDNLQDYDIDHIYPQSFIKDDSFDNRVLVQRAYNNGKSDNVPVLLFGNKIAAGLGITIRQMWKKWLELGLISKRKFNNLITDPEKISRNMASGFVNRQLVETSQVIKLVANILQAKLPDTEIIEVKASYNSILRKEFNLYKSREVNDYHHAIDAYLTTIVGNYLYQVYPKLRPYFVYGQFKKFGKAENQEDDPVKKIKKFNFIYQLIWGKDDAICISHTNQQVFSKKDIIDKLTTAYNFKYMNISHAVYTRNNNMFKQTLFPIIERTTAKTKSLIPKKLDRPTDIYGGYSNNNDAYLALVKVDKKRGSEYRVVGIPMRAAAMLKASKNYDEDLRKVIEPMVMFDKNGKAKRGIEGFRVLVGKMPFKQAVLDGNKKFMLTGTVDTPNLKQLVLSQQNMKYILDYIEDVDCRKHKFGDKVQNPDKCLLEVFDEIIEIVDKYFELFDSRDFREKLRNSRNKFIKLEASKKADTILAILKGLQAKSTRATIKELNISDFGRIITSSISPEAQLIYQSPTGLFERRVKVKDL

SEQ ID NO: 119 - protein, 1140 aa, Roseburia intestinalis
MRENGSDERRRNMDEKMDYRIGLDIGIASVGWAVLQNNSDDEPVRIVDLGVRIFDTAEIPKTGESLAGPRRAARTTRRRLRRRKHRLDRIKWLFENQGLINIDDFLKRYNMAGLPDVYQLRYEALDRKLTDEELAQVLLHIAKHRGFRSTRKAETAAKENGAVLKATDENQKRMQEKGYRTVGEMIYLDEAFRTGCSWSEKGYILTPRNKAENYQHTMLRAMLVEEVKEIFSSQRRLGNEKATEELEEKYLEIMTSQRSFDLGPGMQPDGKPSPYAMEGFSDRVGKCTFLGDQGELRGAKGTYTAEYFVALQKINHTKLVNQDGETRNFTEEERRALTLLLFTQKEVKYAAVRKKLGLPEDILFYNLNYKKAATKEEQQKENQNTEKAKFIGMPYYHDYKKCLEERVKYLTENEVRDLFDEIGMILTCYKNDDSRTERLAKLGLVPIEMEGLLAYTPTKFQHLSMKAMRNIIPFLEKGMTYDKACEEAGYDFKADSKGTKQKLLTGENVNQTINEITNPVVKRSVSQTVKVINAIIRTYGSPQAINIELAREMSKTFEERRKIKGDMEKRQKNNEDVKKQIQELGKLSPTGQDILKYRLWQEQQGICMYSGKTIPLEELFKPGYDIDHILPYSITFDDSFRNKVLVTSQENRQKGNRTPYEYMGNDEQRWNEFETRVKTTIRDYKKQQKLLKKHFSEEERSEFKERNLTDTKYITTVIYNMIRQNLEMAPLNRPEKKKQVRAVNGAITAYLRKRWGLPQKNRETDTHHAMDAVVIACCTDGMIQKISRYTKVRERCYSKGTEFVDAETGEIFRPEDYSRAEWDEIFGVHIPKPWETFRAELDVRMGDDPKGFLDTHSDVALELDYPEYIYENLRPIFVSRMPNHKVTGAAHADTIRSPRHFKDEGIVLTKTALTDLKLDKDGEIDGYYNPQSDLLLYEALKKQLLLYGNDAKKAFAQDFHKPKADGTEGPVVRKVKIQKKQTMGVFVDSGNGIAENGGMVRIDVFRVNGKYYFVPVYTADVVKKVLPNRASTAHKPYGEWKVMEDKDFLFSLYSRDLIHIKSKKDIPIKMVNGGMEGIKETYAYYIGADISAANIQGIAHDSRYKFRGLGIQSLDVLEKCQIDVLGHVSVVRSEKRMGFS

SEQ ID NO: 120 - protein, 992 aa, Treponema vincentii
MQKNSGEDENCGFEFLTEEEKELIKPLFFRISKPSFQFADIEKKLKGKNGFWKFNYRKDTNVSGCPVSAGLKNIFGDEASAESWKDKKVGQYDMCDIWHVLFDFDDEEKLLEFAKRKLFLSDEAAKKFCAIRIQQGYANLSLKAIRKITPFLRKGYIYSTAVFLANIPFMIGRDIFLQNEKEIEDSVKNIIGTLRDKNNIIVLANRCIESAFKDKDNDFRFEEWDKALVENSAWDLFGKKKWNEYDEEKRKTIISQVSEKVEDNLKIAVGKNPNDYKYPLLRTDDLIMDYLNQKGFVVKGELYHPSDTDYNFETPVPAEDGKIYLASPRSPSVKNPVVMRALHQLRKLVNYLIKTGKIDSTTKINVELANDVNDKNQRKAIEELAKTNEKNNADARKKIEELCNEAGFKVVPTESDIKKFRLWKEQNETCPYTGKHISFTDLFGPIPKFDFEHTIPRSLSYDDSLENLTLCDSEFNRNIKKQRLPSELPDFEEINKRFLKFYEDKIDNCLRIIELNSKSGGSYEEPAVKDLRIVKKHKAQYELNYYKEKLRRFSSTEITSGFKHSQLNDTRIITKFSLSYLKGVFDHVQPVKGSMTDTFKRQWGLMERNEIKDRSNHTHHTVDALTVACINRGKFNLLSEAIKNSSDGKHLKFPKPWETFDTDVLNAVRYIIPKYFSDESSLRQSKKILRGRDGKPVLKNGKAVFIQGATARGSLHKDTFYGCIKTVPEKGGKSEMIFVQRIPVSTLDEKVAEKIIDKRIRKTFEKNLSTGIQTLQEIQTDGILLPFKKEGRDVFVKRVRIKAHPTSPIILKKHHNVINKNPKDYKQNYYVENEENYLLAIYRGKDAKGKDVSDHKLCNLLNAVKSRQNKTGFYPDFKEKKGINLQLYKVLKIGKIVILQNDIQEDVFALPKEKLWKRMYRIAGLATSRNDIQIKLVHIIRETPWGYMKGEKDLNAGKECLLYGTANFKGLVEGQDFTVSPAGEIIQKARVC

SEQ ID NO: 121 - protein, 1340 aa, Enterococcus faecium
MKKEYTIGLDIGTNSVGWSVLTDDYRLVSKKMKVAGNTEKSSTKKNFWGVRLFDEGQTAEARRSKRTARRRLARRRQRILELQKIFAPEILKIDEHFFARLNESFLVPDEKKQSRHPVFATIKQEKSYHQTYPTIYHLRQALADSSEKADIRLVYLAMAHLLKYRGHFLIEGELNTENSSVTETFRQFLSTYNQQFSEAGDKQTEKLDEAVDCSFVFTEKMSKTKKAETLLKYFPHEKSNGYLSQFIKLMVGNQGNFKNVFGLEEEAKLQFSKETYEEDLEELLEKIGDDYIDLFVQAKNVYDAVLLSEILSDSTKNTRAKLSAGMIRRYDAHKEDLVLLKRFVKENLPKKYRAFFGDNSVNGYAGYIEGHATQEAFYKFVKKELTGIRGSEVFLTKIEQENFLRKQRTFDNGVIPHQIHLSELRAIIANQKKHYPFLKEEQEKLESLLTFKIPYYVGPLAKKQENSPFAWLIRKSEEKIKPWNLPEIVDMEGSAVRFIERMINTDMYMPHNKVLPKNSLLYQKFSIYNELTKVRYQDERGQMNYFSSIEKKEIFHELFEKNRKVTKKDLQEFLYLKYDIKHAELSGIEKAFNASYTTYHDFLTMSENKREMKQWLEDPELASMFEEIIKTLTVFEDREMIKTRLSHHEATLGKHIIKKLTKKHYTGWGRLSKELIQGIRDKQSNKTILDYLINDDDFPHHRNRNFMQLINDDSLSFKKEIKKAQMITDTENLEEIVKELTGSPAIKKGILQSLKIVDEIVGIMGYEPANIVVEMARENQTTGRGLKSSRPRLKALEESLKDFGSQLLKEYPTDNSSLQKDRLYLYYLQNGRDMYTGAPLDIHRLSDYDIDHIIPRSFTTDNSIDNKVLVSSKENRLKKDDVPSEKVVKKMRSFWYDLYSSKLISKRKLDNLTKIKLTEEDKAGFIKRQLVETRQITKHVAGILHHRFNKAEDTNDPIRKVRIITLKSALVSQFRNRFGIYKVREINEYHHAHDAYLNGVVALALLKKYPQLAPEFVYGEYLKFNAHKANKATVKKEFYSNIMKFFESDTPVCDENGEIFWDKSKSIAQVKKVINHHHMNIVKKTEIQKGGFSKETVEPKKDSSKLLPRKNNWDPAKYGGLGSPNVAYTVAFTYEKGKARKRTNALEGITIMEREAFEQSPVLFLKNKGYEQAEIEMKLPKYALFELENGRKRMVASNKEAQKANSFLLPEHLVTLLYHAKQYDEISHKESFDYVNEHHKEFSEVFARVLEFAGKYTLAEKNIEKLEKIYKENQTDDLAKLASSFVNLMQFNAMGAPADFKFFDVTIPRKRYTSLTEIWQSTIIHQSITGLYETRIRMGK

SEQ ID NO: 122 - protein, 1363 aa, Lactobacillus rhamnosus
MTKLNQPYGIGLDIGSNSIGFAVVDANSHLLRLKGETAIGARLFREGQSAADRRGSRTTRRRLSRTRWRLSFLRDFFAPHITKIDPDFFLRQKYSEISPKDKDRFKYEKRLFNDRTDAEFYEDYPSMYHLRLHLMTHTHKADPREIFLAIHHILKSRGHFLTPGAAKDFNTDKVDLEDIFPALTEAYAQVYPDLELTFDLAKADDFKAKLLDEQATPSDTQKALVNLLLSSDGEKEIVKKRKQVLTEFAKAITGLKTKFNLALGTEVDEADASNWQFSMGQLDDKWSNIETSMTDQGTEIFEQIQELYRARLLNGIVPAGMSLSQAKVADYGQHKEDLELFKTYLKKLNDHELAKTIRGLYDRYINGDDAKPFLREDFVKALTKEVTAHPNEVSEQLLNRMGQANFMLKQRTKANGAIPIQLQQRELDQIIANQSKYYDWLAAPNPVEAHRWKMPYQLDELLNFHIPYYVGPLITPKQQAESGENVFAWMVRKDPSGNITPYNFDEKVDREASANTFIQRMKTTDTYLIGEDVLPKQSLLYQKYEVLNELNNVRINNECLGTDQKQRLIREVFERHSSVTIKQVADNLVAHGDFARRPEIRGLADEKRFLSSLSTYHQLKEILHEAIDDPTKLLDIENIITWSTVFEDHTIFETKLAEIEWLDPKKINELSGIRYRGWGQFSRKLLDGLKLGNGHTVIQELMLSNHNLMQILADETLKETMTELNQDKLKTDDIEDVINDAYTSPSNKKALRQVLRVVEDIKHAANGQDPSWLFIETADGTGTAGKRTQSRQKQIQTVYANAAQELIDSAVRGELEDKIADKASFTDRLVLYFMQGGRDIYTGAPLNIDQLSHYDIDHILPQSLIKDDSLDNRVLVNATINREKNNVFASTLFAGKMKATWRKWHEAGLISGRKLRNLMLRPDEIDKFAKGFVARQLVETRQIIKLTEQIAAAQYPNTKIIAVKAGLSHQLREELDFPKNRDVNHYHHAFDAFLAARIGTYLLKRYPKLAPFFTYGEFAKVDVKKFREFNFIGALTHAKKNIIAKDTGEIVWDKERDIRELDRIYNFKRMLITHEVYFETADLFKQTIYAAKDSKERGGSKQLIPKKQGYPTQVYGGYTQESGSYNALVRVAEADTTAYQVIKISAQNASKIASANLKSREKGKQLLNEIVVKQLAKRRKNWKPSANSFKIVIPRFGMGTLFQNAKYGLFMVNSDTYYRNYQELWLSRENQKLLKKLFSIKYEKTQMNHDALQVYKAIIDQVEKFFKLYDINQFRAKLSDAIERFEKLPINTDGNKIGKTETLRQILIGLQANGTRSNVKNLGIKTDLGLLQVGSGIKLDKDTQIVYQSPSGLFKRRIPLADL

SEQ ID NO: 123 - protein, 1234 aa, Prevotella tannerae
MPNFWSIFTENLQTYLMKTRILGLDTGTNSLGWAVVDRDENNQYTPICRGDLIFTEGVKQEKGIEFSLAAERTSYRASRRHYFRRRLRKVEVLKVLVKHKLCPPLSDEALNRWHTKKEYPLDEDFILWQRTNEADNKNPYHDRHICLHRKLNLKDSQTDRYTLGRALYHLTQRRGFLSNRLDQNEEAEETGKVKSAISELSKEMKEAGCEFLGDYFYLLYRTEGNRVRIRSRYTDREKHYLQEFKEICRVQELDEDLAKALEKTIFFQRPLKSQRQGVGKCTMEKGHSRCAVSHPLYEEYRLLCYLNNIRIKTPSDDRLRPLNAEEREKITPLFYKEKNFDFEKIAKKLAGKTPFGWIRDAEDWPYQFNYRMTQEAPACPTTAQLIKVFGEDWKAALAETYTMSAKQDGTLKTEDEICTDIWNVLYSFSSKEKLKEFGLKKLQLDEVQAKAFSEIRLTRDFASLSLKAIRKILFFLRTGEDYSKAIFLANIPTIVGEEIWNDIERRSRLLYKVDLALRPQEERDAEEHRTIAERIKAAVAAEVPDAPIDLLYHPSMIEAYPDAKRNERFDCYQLGSPKTNAVRNPMAMRSLHMVRKVINHLLRKHIIDEKTEIHIEYARELNDANKRQAIADWQRELSKRHTAYAQNIRQLYKAETGLVIEPTKADILKYQLWEEQQHVCLYTGKKIGIADFLGANPKFDIEHTIPRSRGGDSTQENLTLCESKFNRDIKRDKLPTELANYEEILARIEHWKKQCYALKLKRDGIRTHSGLEKSIKDSRIRRRHLVGLEYGYLKGKYDRFTMKEVPEGFSRRQGAGIGLISKYAGLFLKSLFKDPKNPNRSNVYVVKGAITAEFRKLWGLQQADEAKSRENHTHHCIDAYTIACIGPCEYAALAAYYRSDEEFKYGRRREKPQFEKPWPTFTEDLLKLQEELLIVHQTTDKLGKRDRRKVKTPRGKFLTGGDSARGRLHQETYYGAINYDGNIKYVVRKPLDSLTEKDLDKIVDETVMGIVKGAVEAKGSLKEALADGIYMNKEKGILIKRVRIFSDVSEPINLKQLRDVSTKEYKRHIHLRKDENYLFAIYEGIDKKKNKKQTETATVDYLDAAKFYKDSKRRDKANSLVGDYSKKNKLPLKCILKKRQMVLFYEHSPEEIRFKDKKDLSRRLYIVTSIAKDGRVKFLHHQAATATGIQSSPSPFTNDGEHQPYYRLSASNIKVLVAGIDFDINILGEITPKL

SEQ ID NO: 124 - protein, 1496 aa, Prevotella veroralis
MKTILGLDLGTNSIGWAKVCVDDNGNYLRDIKLGSRIIPMSQDVLGNFDKGVTESQTSVRTGFRGVRRIRERSLLRRERLHRVLHVLGYLPPHYDSAIGWNKNEPSTYGKFLNHGEPKLAWEHKEDGSMRFLFMESFHEMMADFAKSQPSLVSDGKKIPLDWTIYYLRKKALSQPIRKEELAWLLLNFNQKRGYYQLRGEEDDDNPTKCEEYYELKVVGIEADEEGKNGNTWYNVKLENGWIYRRQSKIPLDDWIGKVREFIVTTEYEKDGITLKKDKNGDVKRSFRSPSEDDWGLRKKRTEKLLDSSKMTVGAFVYDHLLAEPSDKIRGKFIRTIERKYYKKELYAILCEQSKYHEELRSGDYLNKCAEELYKNNQPHRNSLLTKDLAYLLLEDLIFYQRPLKTKKSLIAECPYEAYKYVDKETGEIKRQGIKCIAKSNPYYQEFRLWQFISNLRLFNKADDKEVTADYLPTQDDYVRLFAYLNDRKEINQETLLKEFFKLKKITVNSEKVFPIRWNYIEDKEKKYPCNETRHELLLALDRARIDHSWLEKPGQEYRLWHLLYSVESKEETKEALRKLKDDDAFVESFLKVKPFKREYGAYSEKAIKKLLAVMRMGSLWRETDICDTTKGNITKILQGEIDEKLKEKISASVSSYNQLSDFQGLPVWLACYVVYGRHSEAAEIQHWKTPESLLAYINGFKQHSLRNPIVEQCILETLRTVHDIWKEVGHIDEIHVELGRNMKSTADQRARISENVLRNENTNLRIKSLLLELKNDPNIKDVRPYSPMQQEKLRIYEEGVLQELTKDDKDFTEITKISTMAQPSAKELQRYKLWLEQKYRSPYTGKSISLTKLFTSAYQIEHVIPQSRYFDDSFSNKVICESEVNSLKDNMLGYEFIKNHGGEIIHCTMLGDVKVLSESEYKAFVNDHYAHNKRKRENLLLEDIPQEFLNRQMNDSRYISKVVKALLSNIVRAEGEEEATSKFVVSCSGGITDRLKKDWGLNDVWNKIVYPRFERLNRLTGTEAFGQWENKDGKRVFQTAVPLELQRGFNKKRIDHRHHAMDALVIACTSRNIINYLNNESANNPKKREDLRQKLCDKNRTIRKPWETFTQDATAALEDVIVSFKNYVRIINKATNYYERYDVEGKKVIAEQRGDDMWAIRKPMHEATYYGRVNLRRKKKVNLRVALENISSICDNKLRIYINGLVEKGFNTKQILDKFKNTNDHFSMQKIDKVEIWQFTNEEEKLVATRKPLDTSFDTKKIASITDTGIQTILLNYLETKGGDSTIAFTPEGIVEMNQNISKYNNGKEHMPILKVRLYTKLGKKIPVGQTGCKAKQFVIAEAGTNLYFAIYEDEEGKRSYRTIPLNEVVERLKQGLSPVPEKNDKDVHLKFYLSPNDLVYVPIEDEHESLAKDHIYKFVDSSGTTANFIPHRSANVIFELNKKDAEKFCSGSIIQNEYGVGSSQSKNQKAITGEMIKAVCRKLEVDRLGNVIKVI

SEQ ID NO: 125 - protein, 1082 aa, Neisseria cinerea
MAAFKPNPMNYILGLDIGIASVGWAIVEIDEEENPIRLIDLGVRVFERAEVPKTGDSLAAARRLARSVRRLTRRRAHRLLRARRLLKREGVLQAADFDENGLIKSLPNTPWQLRAAALDRKLTPLEWSAVLLHLIKHRGYLSQRKNEGETADKELGALLKGVADNTHALQTGDFRTPAELALNKFEKESGHIRNQRGDYSHTFNRKDLQAELNLLFEKQKEFGNPHVSDGLKEGIETLLMTQRPALSGDAVQKMLGHCTFEPTEPKAAKNTYTAERFVWLTKLNNLRILEQGSERPLTDTERATLMDEPYRKSKLTYAQARKLLDLDDTAFFKGLRYGKDNAEASTLMEMKAYHAISRALEKEGLKDKKSPLNLSPELQDEIGTAFSLFKTDEDITGRLKDRVQPEILEALLKHISFDKFVQISLKALRRIVPLMEQGNRYDEACTEIYGDHYGKKNTEEKIYLPPIPADEIRNPVVLRALSQARKVINGVVRRYGSPARIHIETAREVGKSFKDRKEIEKRQEENRKDREKSAAKFREYFPNFVGEPKSKDILKLRLYEQQHGKCLYSGKEINLGRLNEKGYVEIDHALPFSRTWDDSFNNKVLALGSENQNKGNQTPYEYFNGKDNSREWQEFKARVETSRFPRSKKQRILLQKFDEDGFKERNLNDTRYINRFLCQFVADHMLLTGKGKRRVFASNGQITNLLRGFWGLRKVRAENDRHHALDAVVVACSTIAMQQKITRFVRYKEMNAFDGKTIDKETGEVLHQKAHFPQPWEFFAQEVMIRVFGKPDGKPEFEEADTPEKLRTLLAEKLSSRPEAVHKYVTPLFISRAPNRKMSGQGHMETVKSAKRLDEGISVLRVPLTQLKLKDLEKMVNREREPKLYEALKARLEAHKDDPAKAFAEPFYKYDKAGNRTQQVKAVRVEQVQKTGVWVHNHNGIADNATIVRVDVFEKGGKYYLVPIYSWQVAKGILPDRAVVQGKDEEDWTVMDDSFEFKFVLYANDLIKLTAKKNEFLGYFVSLNRATGAIDIRTHDTDSTKGKNGIFQSVGVKTALSFQKYQIDELGKEIRPCRLKKRPPVR

SEQ ID NO: 126 - protein, 1512 aa, Fibrobacter succinogenes
MKKILGLDLGTNSIGWAVVNADEITRDDGSRYLKPNGISAAGSRIIPMSADILGDFEKGNSISQTAERTRMRMARRLHERALLRRERLLRVLNLLDFLPKHFADKIDRYGKFTDDSEPKLAWRKNTEGKYEFIFQDAFNEMLAEFKDKQPEIVEEGKKIPYDWTIYYLRKKALEKALSKEELSWILLQFNQKRGYYQLRGEEEEIPQDKKIEYLAQKVVKVEATDQKKGDDVWYNVYLENGMIYRRTSKAPLDWEGKVKEFIVTTEVENDGETPKKDKEGNIKRSFRAPKEDDWTLLKKKTEADIENSHKTVGCYIYDSLLNNPKQKIIGKLVRTVERKFYKEELTQILKKQVELIPELRDDNLYKQCIEELYPINEAHRNTIAKTDFANLFINDILFYQRPLKSKKSQIDNCPYEERIFIDSKTGEKKKVPVKCIAKSNPLFQEFRLWQFIQNLRIYQREKEIDGKLLTDIDITSECLKSEEDYVRLFDWLNDRETIEQEDLLKHLFNTKKSKNKENPYRWNYVEDKVYPCNETRATILKGFSKCGINASVLSPELEMALWHILYSVEDKKEIETALTHFAQKQGWNDDFAKVFSKAKPFKKDYGSYSEKAIKKLLSLMRMGKYWNQDNIDKNTLDRIDKIINGEYDEKISNRVRDNAINLKDISDFRGLPVWLACYIVYDRHSEAKDCTKWNSPEEIDSYLKKFKQHSLRNPIVEQVVTETLRTVRDIWIQEEQIDEIHLELGRDLKNPADKRKKMSENILKNENTNLRIKAMLMEFMNPSMGIENVRPYSPSQQDILRIYEENALDNLTKDDKDFDFISKISKQAQPSKTDIIRYKCWLEQKYRSPYTGKTISLSKLFTPAYEIEHVIPQSLYFDDSFSNKVICEAEVNKLKDRQLGYKFIAEHHGEKVQLSQGEVVEILSVDAYEKFVKENYANNRIKMKKLLMESIPDEFIERQLNDSRYISKVVKGLLSNIVREKIDDENYEPEAVSKNLISCNGAITDRLKKDWGMNDVWNSIILPRFIRMNQITGKDCFTTTNAEGHLIPQMPLELQKGFNKKRIDHRHHAMDAIVIACTTRDHVNLLNNEAAHSKFNATRYQLQRKLRRFEKAVIDGKEREVAKEFLKPWDSFSSDSKNILENIIVSFKQNQRVINKTTNAFLHFDENGKKTFIKQGKGDSWAIRKSMHKDTVFGEINLRKVRSVSLNEAIKVPERVLNKKIKEKILELKNNKIDAKNIKKYIEENHTGGYGIDSSKIDVFYFTKETKERFFATRKTLDTSFNQAKIKDSIADSGIQKILLAHLKSKNGDAEQAFSPDGIDEMNKNIVELNNGKFHQPILKVRVYEKADKFAVGQKGNKKVKFVEAAKGTNLFFAIFEKDGKRSYLTIPLNVMIDCQKQYGNQWKNNIEAYLKEKELVEKDVKLQFILSPNDLVYLPTEGSIDKKRIYKVVSFTNNRLYAIPYAIAKSIVDKNEFTQLNKIEFTDNKESIKDACVPVIIDRLGNVIEFNGKRL

SEQ ID NO: 127 - protein, 1259 aa, Streptobacillus moniliformis
MKYILGLDLGVASIGWAVTEINEKGEPVGLIDANSVIFKPLDNDKGKLYNVERRDKRGSRRILRRKKHRVERTKMLLVNSSFLTNEEIDNLYVGKLDNIYEVRLKGLKEQLSKNEIARLMIYYCKNRGFKSNRKTEDLEILKSLGEKISEKDSDEKKLKPIIAKNTELIESKGLTPIEVIYMIRENDNSILGFKNKEGNYKFGFKRNQVIDEVRKILGTQQILSKEIVDEYIDILSSQRDFSDGPGGDSKYKIDYTKLAGKCKYTGEVRAVKSAPSYEIFTMLQKLNDIRYVKFTSEDKIEKKKLSKEVIHKLYDLVVEKNKTLTYDLIEKSIDEENIKLLNIPKLSKSKYVELRKSYFKERNDNENLTEEEINAFNEKLNNERMKQELIRNNLKAYKELKSKFKKNNIDENRIKELGGIYFLDLVAELLTYSKTDEKLEYFVENVERYSLFKEQRDIVEIIKTFPNYTKNGNLSLSLVRELNKLLMEGHDYESSLSSLNYYIDTDVDWEKFPTISEIEDSLSTKITNPNVKHILVILRKLYNTLLFKYGRPEKVHLELSRDFSNDFSTRNKIQKEQLENKVRREVAAFEMYGANKDIVAGKDRLSNDDFVRIKLWEEQNKVCMYSGRTIEKYQLTSAEVQIDHILPYSKSFDNSYSNKVLVFSNENQDKKERTPYQWLKGTEKWNEFKQRVRLNLNISNKKKENLLFEDEVVNNEFLERELHATSYSSRLALNIFQRLIPVSDEDKYDEHGNEKVKYLYNRNVIAFQGKMTSMLRNLYSLNKYTHSFESDTLDIDNKAFILKEFEINKDNLKMTAYNVNTGLEITSETKVEKNKSGEFKTIKDELLKKELDKKENLIEISDYFKDKVLFDLKIVDFEEIDTVEPEIISILYKMITALKEEVYSKNRENHLHHSLDAFLLTIMNRSMQMKLIKYNQLISVLKNKEIEIFNEEKGEYIDSKEFAEELQKQKIIDIDGNERGIKFNVNGKTHRLNLVKPYENFLDDIKNKIFDKRENNKLPYHVVKSKVSGALHAETILGESKGEITKRISVFDINYKNLGKIFDKDGSQKEIYETLVKWLEAKSKDYPKLKNGNIIKKVKIVDGNKDKLIKLGNKRYVEMGRTTVKILVLKKEAEEGLKFASIGRYKYNLLKSEKDVNISIWKDAIHFCKVRYNKLKENGYRLIHELIPGETIELELNKGNISKCLVVGFSGGKIEISSVIGDALDLINDKISTRIKERYYITVSTIKSIKKINKNILGD

SEQ ID NO: 128 - protein, 1091 aa, Mobiluncus mulieris
MDSRKYRVGIDVGTNSVGFAAVEEDDSGSPTRFLNTMVVIHDSGVDPEQKKYAITRLASAGTARRTRRLYRTRRQRLRELDDFISNELGYPLVNLENFADPYEPWKVRADLATTKLPNDELPEAMSIALRHMARHRGWRSPYQRVEALHLHAEISKEFAALKERVVEKTGDVFSDDATPAEVLVDLMGRQKVRGADGVLSGKLRQSDNANELRKIASVQGIDDETLNRIIDRVFSSKSPKGKASERVGMDALPGQGSKPRALKAMPSFQKFRVVSVICNLRIKDSGGDARPLSMEEKEKLIDYLMSSTTDDHVTWTDVADLLHVKRSQLQGTAKEGFDGERPYTRPPVNSTWSKIKDSKIKSLVALWKTGDVDVQSAIVEALSNASVLEDSRPGADIVVAYLESLDDKELESLDKVGLPAGRASYSEDSLERLTERMLRDDCDLFEARKREFNVADDWKPPADPIYAPVGNPGVDRVLKIVNRLLMAAEREWGAPTQINIEHVRSGFSSELMQREFERENERRRAQNEEAVKAILTEKGGNSRVSKYDITRYYAVKRQHCQCLYCGTPITFSDCELDHIVPRKGVGSTNTRVNLAAACRSCNRDKSNLPFAVWAGKASNFDVSIDDAVSRVKQWQRSQNEGVREFRAFQNEVISRLLKTTEDPEIDSRSLESVAWMARELHHRVEYYFQSKGAQTQVSVYRGAVTAQARKSSGLEDKVKMIGGGGKTRLDRRHHAMDAATIALMTPGISTTLSEKNNLRDAQKFTGQSETWKDYCGRTETARKHFAVWKSNMERLTDLFNDKLENDAIPVVQPLRLRLSNSKAHDDGIGKLDSKKLGSVWSLADIDRAATPQIWTALTRCDDFDPTKGLPENANRVIRAQGVKYESEDNIPVFPSNVAAIAVRDGYAEIGSTIHHARIYRIDDGKKTFYSMIRVFAVDLLKHQAEDLFTVKLPPSAISIRTCEDSLRRALSNGTAEYLGWLVPGDEIIVDTSDKAFHTGQIGDLLRNFPVNSFRLTGFPSNSRLRLKPVLLAGEGLRDDAEDSIKKILLGQGWRPAINVLFSKGKPRIVRRNSLGIERPSSNNGLPFSWEA

SEQ ID NO: 129 - protein, 872 aa, Candidatus Parvarchaeum
MLGSSRYLRYNLTSFEGKEPFLIMGYYKEYNKELSSKAQKEFNDQISEFNSYYKLGIDLGDKTGIAIVKGNKIILAKTLIDLHSQKLDKRREARRNRRTRLSRKKRLARLRSWVMRQKVGNQRLPDPYKIMHDNKYWSIYNKSNSANKKNWIDLLIHSNSLSADDFVRGLTIIFRKRGYLAFKYLSRLSDKEFEKYIDNLKPPISKYEYDEDLEELSSRVENGEIEEKKFEGLKNKLDKIDKESKDFQVKQREEVKKELEDLVDLFAKSVDNKIDKARWKRELNNLLDKKVRKIRFDNRFILKCKIKGCNKNTPKKEKVRDFELKMVLNNARSDYQISDEDLNSFRNEVINIFQKKENLKKGELKGVTIEDLRKQLNKTFNKAKIKKGIREQIRSIVFEKISGRSKFCKEHLKEFSEKPAPSDRINYGVNSAREQHDFRVLNFIDKKIFKDKLIDPSKLRYITIESPEPETEKLEKGQISEKSFETLKEKLAKETGGIDIYTGEKLKKDFEIEHIFPRARMGPSIRENEVASNLETNKEKADRTPWEWFGQDEKRWSEFEKRVTSLYSKKKISERKREILLNKSNEYPGLNPTELSRIPSTLSDFVESIRKMFVKYGYEEPQTLVQKGKPIIQVVRGRDTQALRWRWHALDSNIIPEKDRKSSFNHAEDAVIAACMPPYYLRQKIFREEAKIKRKVSNKEKEVTRPDMPTKKIAPNWSEFMKTRNEPVIEVIGKVKPSWKNSIMDQTFYKYLLKPFKDNLIKIPNVKNTYKWIGVNGQTDSLSLPSKVLSISNKKVDSSTVLLVHDKKGGKRNWVPKSIGGLLVYITPKDGPKRIVQVKPATQGLLIYRNEDGRVDAVREFINPVIEMYNNG

SEQ ID NO: 130 - protein, 1229 aa, Pediococcus acidilactici
MGDRKYNLGLDIGTSSIGFAAVDENNQPIRVKGKTAIGVRLFEEGKTAADRRGFRTTRRRLSRRRWRINLLNEIFDAHLAEVDPTFLARLKESNRSNLDPKKSFQGSLLFPERKDYQFYEEYPTIYHLRKALMEKDRKFDIREIYLAVHHIIKYRGNFLNGTPMRSFKVENIELNTLFDQLNQLYAEIVPDNELAFDLAQVADVKDVLSSTTIYKMDKKKQLVKMMLLPASNKALQSENKKIVTQFVNAILNYKFKLDVLLQVETDADWSLKLNDEGADDKLEEFTGDLDENRLEIIDLLQRLHNWFSLNEITKDGNSLSAAMVEKYENHHHHLGLLKKVIENHPDAKKAKALKETYTAYVGKTDDKTQNQDDFYKAVEKNLDDSPDAKGIKRLIQLDQFMPKQRTGQNGAIPHQLHQQELDQIIEKQSKYYPFLAEPNPNVKRRKDAPYKLDELIAFKIPYYVGPLVTPEEQAQNKENVFAWMKRKAAGPITPWNFDEKVDRMESANRFIRRMTTKDTYLFGEDVLPAESMIYQKFVVLNELNNLKINGRHLSLKDKQDVYNDLFKQQKTVSIKALQNYYVTKKKAATAPTVGGLADPKKFLSSLSTYIDFKNMFGERVNDPQFQEDLEQIVEWSTIFEDRGIFKAKLQALGWLSEKQIQQLVAKRYKGWGRLSKKLLTGLKNAEGYSILDEMWRSTENFMQIQSRPEFAALIQQANEKQFEGNDPDNVWENIENILGDAYTSPQNKKAIRQVVKVVQDIEKAVGNPPEKIAIEFTREAAANPQRTQSRLRTLEKLYESAEEVVDAGLTAELAEFKENKHVLSDKYYLYFTQLGRDVYTGDTISLDKLNDYDVDHILPQSFIKDDSLDNRVLTIRAVNNGKSDNVPAKMFGKKMGSFWRHLLDNGMISKRKYNNLITDPDNISKYAQKGFINRQLVETSQVIKLTANILNGIYDKDTEIIEVPAKMNSQMRKMFDLVKVREVNDYHHAFDAYLTIFIGNYLYKCYPKLRPYFVYDNFKKFGNKEDIGHKRFNFLGKIEREKKVVAPETGEILWSNVAPNETIKQIKKVYNYKFMIVSREITTRRAELFNQTVYPKNYRGKLIPIKEDRPTDLYGGYSGNTDAYLAIVALEDKKKGKYFKVVGIPTRAAAKLEKLKQQDSQQYLQALHEVIAPQFTKSTKKGIKKTEFEIVLDKVHYRQLVQDGPVKMMLGSSTYKYNAKQLVLSEKAL

SEQ ID NO: 131 - protein, 1398 aa, Veillonella parvula
METQASNQLISSHLKGYPIKDYFVGLDIGTSSVGWAVTNKAYELLKFRSHKMWGSRLFDEGESAVARRGFRSMRRRLERRKLRLKLLEELFADAMAQVDPTFFMRLRESKYHYEDKTTGHSSKHILFIDKNYNDQDYFKEYPTVYHLRSELMKSGTDDIRKLFLAVHHILKYRGNFLYEGATFDSNASTLDDVIKQALENITFNCFDCNSAISSIGQILMEAGKTKSDKAKAIEHLVDTYIATDTVDTSSKTQKDQVKEDKKRLKAFANLVLGLNASLIDLFGSVEELEEDLKKLQITGDTYDDKRDELAKAWSDEIYIIDDCKSVYDAIILLSIKEPGLTISESKVKAFNKHKDDLAILKSLLKSDRSIYNTMFKVDEKGLHNYVHYIKQGRTEETSCNREDFYKYTKKIVEGLSDSKDKEYILSQIELQILLPLQRIKDNGVIPYQLHLEELKAILAKCGPKFPFLNEVADGFSVAEKLIKMLEFRIPYYVGPLNTHHNVDNGGFAWAVRKASGRVTPWNFDDKIDREKSAAAFIKNLTNKCTYLLGEDVLPKSSLLYSEFMLLNELNNVRIDGKPLEKVVKEHLIEAVFKQDHKKMTKNRIEQFLKDNGYISETHKHEITGLDGEIKNDLASYRDMVRILGDGFDRSMAEEIITDITIFGESKKMLRETLRKKFASCLDDEAIKKLTKLRYRDWGRLSQKLLNGIEGCDKAGDGTPETIIILMRNFSYNLMELLGDKFSFMERIQEINAKLTEGQIVNPHDIIDDLALSPAVKRAVWQALRIVDEVAHIKKALPARIFVEVTRSNKNEKKKKDSRQKRLSDLYAAIKKDDVLLNGLNNEIFGELKSSLAKYDDAALRSKKLYLYYTQMGRCAYTGEIIELSLLNTDNYDIDHIYPRSLTKDDSFDNLVLCKRTANAQKSDAYPISEEIQKTQKPFWTFLKQQGLISERKYERLTRITPLTADDLSGFIARQLVETNQSVKAATTLLRRLYPGVDVVFVKAENVTDFRHDNNFIKVRSLNHHHHAKDAYLNIVVGNVYHERFTRNFRAFFKKNGANRTYNLAKMFNYDVNCTNAKDGKAWDVKTSMDTVKKMMDSNDVRVTKRLLEQTGALADATIYKATVAGKAKDGAYIGMKTKSSVFADVSKYGGMTKIKNAYSIIVQYTGKKGEVIKEIVPLPIYLTNRNTTDQDLINYVASIIPQAKDISIIYGKLCINQLVKVNGFYYYLGGKTNSKFCIDNAIQVIVSNEWIPYLKVLEKFNNMRKDNKDLKANVVSTRALDNKHTIEVRIVEEKNIEFFDYLVSKLKMPIYQKMKGNKAAELSEKGYGLFKKMSLEEQSIHLIELLNLLTNQKTTFEVKPLGITASRSTVGSKISNQDEFKVINESITGLYSNEVTIV

SEQ ID NO: 132 - protein, 1485 aa, Prevotella bivia
MKNILGLDLGTNSIGWAKISIDDNGKYIKDSIKLGSRIIPMSQDVLSNFSKGVTLSQTSERTSFRGARRLRERTLLRRERLHRILHLLGFLPKHYEKAIGWDRNDNKTYGKFINHAEPKLAWCKDNNGKMRFLFMDSFHDMLSEFSEKHPELLANGKKIPLDWTIYYLRKKALYKAITKEELAWILLNFNQKRGYYQLRGEEDRDSEANKKEYLELKVIGVEATGEKKGNDIWYNIHLENGWIYRRSSKNPLNDWLGKVKSFIVTTDLDADGNPKKDKDGNIKRSFRAPSEGDWTLIKKRTESLLENSGQTVGQFIYNHILEEPSAKIRGNFIRTIERKYYKDELKAILEKQKEFHHELSSESLLTECAKELYKRNIAHQEVLLKKGIIHLLLNDILFYQRPLKIKKSLIDNCPYENYKYVDKKSGDIKVKSIKCIAKSNPFFQEFRLWQFVSNLRLYRKSDDKDVTSEHLVTTDDYANLFTYLNNRKDIKQSVLLKEYFKIKKVKTINGAEYPVRWNYIDDDNKTYPCNETRYDILHALSKTELKSEWLTPERTYRLWHLLYSIESKEETKKALNKLNLSDDFTEAFLTIKPFKKEYGSYSEKAIKKLLSLMRMGYLWSEDEAIKQVGAEIEKTIEGELPDYVLQRLEKSQHNYNKISDFSGLPLWLASYIIYGRHSEAKEIIHWDNPESMMAYIKDFRQHSMRNPIVEQCVLETLRTVHDIWKEIGHIDEIHIELGREMKSTSEQRKAITQNVLHNQNTNIRIKLLLQELKNDNNITGVRPYSPMQQEILRIYEEGALQGLTKEDKDYNDILKISQTAQPTSNELTRYKLWLEQKYRSPYTGKAISLSKLFTSAYQIEHVIPQSRYFDDSLSNKVICESEVNTLKKAMLGMEFIKTCGGQKVHCTLLGDVEIYNEEDYKAFVNEHYSNNRTKRNKLLMEDIPQEFINRQLNDSRYISKMVKQLLSAIVRGQEEVEATSKFVIPCTGGITDRLKKDWGLNDIWNNLVSPRFQRMNALTGSEYFGHWENKEGKRVFQTTMPIQLQQGFSKKRIDHRHHAMDALVIACASRNIISYLNNETAQDTERRRDLRQKLCDKGGSVRKPWDSFTQDTQYALKDIIVTFKNYVRIINKATNYYEHYKTDGKKGMISQKGDELWAIRKPMHKETVFGKVNLRRPKRVSLSKAIDSVDIICNRKLKKYIKARLNEGLQKKQILNIFKELNNVWEGIDVNKIDIWEMSNDKEPMVATRKQLDTSFDEKKIRSISDTGIQKILLNYLITKNNNPELAFTPEGIQEMNSNISEYNDHKKHQPIYKVRVTEPLGAKYPIGTMGNNPKKFVEAQAGTNLYFAIYEDKEGKRNYDTIPLNIAAERLNQQLSPVPETNENNTPLKFYLSPNDLVYVPSEEERHSGNNIQLDKNRIYKMVSSTSKRCFFIHHRVAISLVDKKEFSAQNKMERSIDNEQVMIKSVCWKLITDRLGNIIKVIK

SEQ ID NO: 133 - protein, 1218 aa, Prevotella buccalis
MNKRILGLDTGTNSLGWAVVDWDEHAQSYELIKYGDVIFQEGVKIEKGIESSKAAERSGYKAIRKQYFRRRLRKIQVLKVLVKYHLCPYLSDDDLRQWHLQKQYPKSDELMLWQRTSDEEGKNPYYDRHRCLHEKLDLTVEADRYTLGRALYHLTQRRGFLSNRLDTSADNKEDGVVKSGISQLSTEMEEAGCEYLGDYFYKLYHEQGNKVRIRQRYTDRKKHYQHEFDAICEKQELSSELIEDLQRAIFFQLPLKSQRHGVGRCTFERGKPRCADSHPDYEEFRMLCFVNNIQVKGPHDLELRPLTYEEREKIEHLFFRKSKPNFDFEDIAKELAGKKNYAWIHDKEERAYKFNYRMTQGVPGCPTTAQLKSIFGDDWKTGIAETYTLIQKKNGSKSLQEMVDDVWNVLYSFSSVEKLKEFAHHKLQLDEENAEKFAKIKLSHSFAALSLKAIRKFLPFLRKGMYYTHASFFANIPTIVGKEIWNNEQSRKYIMENVGELVFNYQPKHRDVQGTIEMLIKDFLANNFELPAGATDKLYHPSMIETYPHALRNEFGILQLGSPRTNAIRNPMAMRSLHVLRRVVNQLLKESIIDENTEVHVEYARELNDANKRRAIADRQKEQDKQHKKYGDEIRKLYKEETGKDIEPTQTDVLKFQLWEEQNHYCLYTGEQIGITDFIGSNPKFDIEHTIPQSVGGDSTQMNLTLCDNRFNREVKKAKLPTELANHEEILTRIEPWKNKYEQLVKERDKQRTFAGMDKAVKDIRIQKRHKLQMEIDYWRGKYERFTMTEVPEGFSRRQGTGIGLISRYAGLYLKSLFHQADSRNKSNVYVVKGVATAEFRKMWGLQSEYEKKCRDNHSHHCMDAITIACIGKREYDLMAEYYHMEETFRQGRGSKPKFSKPWATFTEDVLNIYKNLLVVHDTPNNMPKHTKKYVQTSKGKVLAQGDTARGSLHLDTYYGAIERDGEIRYVVRRPLSSFTNPKELENIVDETVKRTIKEAIADKNFKQAIAEPIYMNEDKGILIKKVRCFANSVKQPINIRQHRDLSKKEYKQQYHVMNENNYLLAIYEGLVKNKVVREFEIVSYIEAAKYYKRSQDRNIFSSIVPTHSTKYGLPLKTKLLMGQQVLMFEENPDEIQVDNTKDLVKRLYKVVGIEKDGRIKFKHHQEARKEGLTIYSTPYKNNDDYVPIFRQSIKNINILVDGIDFNIDILGKVTLKE

SEQ ID NO: 134 - protein, 1218 aa, Prevotella timonensis
MNKRILGLDTGTNSLGWAVVDWDEHAQSYELIKYGDVIFQEGVKIEKGIESSKAAERSGYKAIRKQYFRRRLRKIQVLKVLVKYHLCPYLSDDDLRQWHLQKQYPKSDELMLWQRTSDEEGKNPYYDRHRCLHEKLDLTVEADRYTLGRALYHLTQRRGFLSNRLDTSADNKEDGVVKSGISQLSTEMEEAGCEYLGDYFYKLYDAQGNKVRIRQRYTDRNKHYQHEFDAICEKQELSSELIEDLQRAIFFQLPLKSQRHGVGRCTFERGKPRCADSHPDYEEFRMLCFVNNIQVKGPHDLELRPLTYEEREKIEPLFFRKSKPNFDFEDIAKALAGKKNYAWIHDKEERAYKFNYRMTQGVPGCPTIAQLKSIFGDDWKTGIAETYTLIQKKNGSKSLQEMVDDVWNVLYSFSSVEKLKEFAHHKLQLDEESAEKFAKIKLSHSFAALSLKAIRKFLPFLRKGMYYTHASFFANIPTIVGKEIWNKEQNRKYIMENVGELVFNYQPKHREVQGTIEMLIKDFLANNFELPAGATDKLYHPSMIETYPNAQRNEFGILQLGSPRTNAIRNPMAMRSLHILRRVVNQLLKESIIDENTEVHVEYARELNDANKRRAIADRQKEQDKQHKKYGDEIRKLYKEETGKDIEPTQTDVLKFQLWEEQNHHCLYTGEQIGITDFIGSNPKFDIEHTIPQSVGGDSTQMNLTLCDNRFNREVKKAKLPTELANHEEILTRIEPWKNKYEQLVKERDKQRTFAGMDKAVKDIRIQKRHKLQMEIDYWRGKYERFTMTEVPEGFSRRQGTGIGLISRYAGLYLKSLFHQADSRNKSNVYVVKGVATAEFRKMWGLQSEYEKKCRDNHSHHCMDAITIACIGKREYDLMAEYYRMEETFKQGRGSKPKFSKPWATFTEDVLNIYKNLLVVHDTPNNMPKHTKKYVQTSIGKVLAQGDTARGSLHLDTYYGAIERDGEIRYVVRRPLSSFTKPEELENIVDETVKRTIKEAIADKNFKQAIAEPIYMNEEKGILIKKVRCFAKSVKQPINIRQHRDLSKKEYKQQYHVMNENNYLLAIYEGLVKNKVVREFEIVSYIEAAKYYKRSQDRNIFSSIVPTHSTKYGLPLKTKLLMGQLVLMFEENPDEIQVDNTKDLVKRLYKVVGIEKDGRIKFKYHQEARKEGLPIFSTPYKNNDDYAPIFRQSINNINILVDGIDFTIDILGKVTLKE

SEQ ID NO: 135 - protein, 1487 aa, Prevotella timonensis
MKNILGLDLGSNSVGWALVKVEENGNPIGSIKMGSRIIPMSQDILGSFEKGDTVSQTAQRTLYRGKRRLIERHVLRRERLCRVLHIMNFLPAHFDRLLGWDKTDNKTYGKFIDDSEPKLAWRQNKNEMGKMEFVFMDSFHEMLSDFAKHQPQLIANGKKVPLDWTIYYLRKKALTQLISKEELAWILLNFNKKRGYYQLRGEEEEEQPTKKEEYKVLKVISVDADEGQKGNGIWYNIHLEDGGIYKKKSDIPLYDWVGKTLQLIVVTTYEKDGKTPKIFDSGKQNPSYRLPKEDDWGLVKKRTESQLQSSGKTVGAFIYDNILSKPDDKIRGNLVRTIERKYYKKELIEILQQQAKYHDELHNQNLLESCAKELYAHNDVHYNEVIKSNMINLLVNDIIFYQRPLKSKKSLIANCKYESYEYVDKETGEIKEMPIKCIAKSNPYYQEFRLWQFIHNLRLSDVVTREDVTAQYLSTPQDYCNLFTYLNDRKEIKQDILLKDFFKIKKVQIDKEKVFPIEWNYIKDATKSYPCNETRYELLSALKRAGMDKQWLDDTPNMQYRLWHLLYSVEEKEESAKALRKLYDDDKFVTSFLKIKPFNKCYGAYSEKAIKRLLTLMRMGKAWNEQAIDAKTLKCIQQIITDNVDSKLKEKIDDSRYVLHHVSDFQGLPTYLASYVIYGRHSEVTDIQCWDSPEDLLKFIRDFKQHSLRNPIVEQVILETLRVVYDIWKAEKHIDEIHVEVAREMKLTAQQRNEANLRNLNNEATNLRIKYLLEELKNDTFIKDVRPLSPIHQEKMRIYEQAVLGNLNKQDKDYDDIIKISKKEHPTNAELIRYKLWLEQRYCSPYTGKAISLSKLFTTAYEIEHIIPQSRYFDNSFNNKVICEAEVNKAKGNMLGYEFIKKQGGQKIYCTQLGKAVTILKEEAYKQFVNEHYAHNKRKRDNLLAENIPESFSSRQLNDTRYITKTIMSLLSNVVRQQSEEEATAKNLLPSSGSVTDRLKNDWGLKDVWNTIVTPRFERLNKLSGTNDFGEMKEENGNRYFQTNVPLEYEKGFKKKRIDHRHHAMDALVIACTTRNMVNYISNANANSPKQREDLRQLLCDKNRIINKPWDTFTQDALKALNDIVVSFKNNVRIINRATNRYQRYDKNGKKIIFSQKGDDMWAIRKSMHKETVFGRVNLIRKEVLPIAKALDNISAICNAQLRAYVNDLVDKHFNKKQLVAHFKSLNYKWNRQDVSKVEVWISSDNKTPMVAVRKPLDTSFDKKKIASITDTGIQTILLNYLESKGGDASVAFAPEGIQEMNSNIELYNNGKAHKPIKNVRLSEPLGAKYQVGERGAKTKKYVEADKGTNLFFAIYEDEEGKRYYYSVPLREAIERQKQKLSPVPEYNEKGVALKFYLSPNDLVYVPTEEERTMGTCHIDKARIYKMVSSTGCSCYFVPSTFAKVIVDKVELQSLNKMEKAITDECIKEVCWKLKVDRLGNIINVIK

SEQ ID NO: 136 - protein, 1138 aa, Bifidobacterium dentium
MLCRCHRRYRIGIDVGLMSVGLAAIEVDETGFPIRILNIQSVIHDGGIDPQLGKKKSISRKAISGVARRTRRMRRRKVVRLRQLDATLESLGFPIVEPDSLDTWEIWLTRAKLASSYIQDDETRKEDVSIALRHIARHRGWRNPYSNVESLFVDVAPSEQYEELRRKAEEKLGTSLSGNPTSAEIVECILKRQVGEVQLRTRSRKGVNGNAVEKEGLLPTKLMQSDNAAEIRRIFKVQRIDDETGRKLLRAVFKACSPKGSVERRVGRDALAPGLPRALKASLAFQEYRIANVLTNLVISEDGTKRKLTIAEKQRVFGFLSSNETDDITWIDVAEKLGLERRQIQGVGCLTADGEERISSTPPRNITALHIHSAKPVIREKLVAWWKAASPTVRETMVELLSNTVDIDRVREDMDYSSAVAFIDSLGDEELTALDSVDLLSGRAAYSRQTLKQLTERMLNTDDDLHEARKAVFGVDDNWKPPVDAISTSVGNPAVDRVLKIVNRYLLACQKRWRNPQSVQIEHVRESFSSVAKAKETERVQGERARYRNDLRRELCEQEGLNKIRESDIRRWESVQRQNGTCLYCGSPITFRTCEMDHIVPRKGVGSTNTRVNLAAACAACNKLKSNTAFSVWARTEGAANRKVSQRDAIERVKTFIFNKSVPPREQRAFKQAVISRLRQAESDPAIDNRSIESVAWMADELHRRIEAYFNQDADVSGNTPATQVWVFQGRVTALARKASGIEGRIHFAGEWKKTRLDRRHHAVDAAVIAMMNHSAAQTLVERDSLRLSQWITRKPETWKNYPFSEGQKKTRFKEWLDCMNALLDLLNDALDSDRVPVTRCQRMSLGNSQAHAATIRKMKRVELFSPMDADLIRRASTPALYCALTRLPEYSPEKGLPENRGREIVLNGRHIRSTETVDFFASGAAQLMVRNGSAEIGDSIHHMRIYRYRKTGAKSQEYVYGMIRVFQIDLLHASSENLFAVQLPSQSVSVRYGDKNVVQAIQEGRAEYLGHIVPNDEILISYEGVRMKDSEKIGAYANDFSGTASELAQRRHWVVVGSDVSKLALRPSYLSEEGLENSGSESERLSKQTRKVIEGKGWVVAVNILAKYHPVVIRRNALGEPRFRTNSGMPVSWRWDR

SEQ ID NO: 137 - protein, 587 aa, Neisseria subflava
MATSRSRIRSQTDAFGVVGSLVAFNQTSRLFVAKKNEGETADKELGALLKGVADNAHALQTGNFRTPAELALNKFEKESGHIRNQRGDYSHTFNRKDLQAELNLLFEKQKEFGNPHVSDGLKEGIETLLMAQRPALSGDAVQKMLGYCTFEPTEPKAAKNTYTAGRFIWLTKLNNLRILEQGSERPLTTTERATLMDEPYRKSKLTYAQARKLLGLEDTAFFKGLRYGKDNAEASTLMEMKAYHAISRALEKEGLKDKKSPLNLSPELQDEIGTAFSLFKTDEDITGRLKDRVQPEILEALLKHISFDKFVQISLKALRRIVPLMEQGKRYDEACAEIYGDHYGKKNAEEKIYLPPIPADEIRNPVVLRALSQARKVINAVVRRYGSPARIHIETAREVGKSFKDRKEIEKRQEENRKDREKAAAKFREYFPNFVGEPKSKDILKLRLYEQQHGKCLYSGKEINLGRLNEKGYIEIDHALPFSRTWDDSFNNKVLVLGSENQNKGNQTPYEYFNGKDNSREWQEFKARVETSRFPRSKKQRILLQKFDEDGIYRIGVKTALSFPKYQIDELGKEIRPCRLKKRPPVR

SEQ ID NO: 138 - protein, 1269 aa, Mycoplasma gallisepticum
MNNSIKSKPEVTIGLDLGVGSVGWAIVDNETNIIHHLGSRLFSQAKTAEDRRSFRGVRRLIRRRKYKLKRFVNLIWKYNSYFGFKNKEDILNNYQEQQKLHNTVLNLKSEALNAKIDPKALSWILHDYLKNRGHFYEDNRDFNVYPTKELAKYFDKYGYYKGIIDSKEDNDNKLEEELTKYKFSNKHWLEEVKKVLSNQTGLPEKFKEEYESLFSYVRNYSEGPGSINSVSPYGIYHLDEKEGKVVQKYNNIWDKTIGKCNIFPDEYRAPKNSPIAMIFNEINELSTIRSYSIYLTGWFINQEFKKAYLNKLLDLLIKTNGEKPIDARQFKKLREETIAESIGKETLKDVENEEKLEKEDHKWKLKGLKLNTNGKIQYNDLSSLAKFVHKLKQHLKLDFLLEDQYATLDKINFLQSLFVYLGKHLRYSNRVDSANLKEFSDSNKLFERILQKQKDGLFKLFEQTDKDDEKILAQTHSLSTKAMLLAITRMTNLDNDEDNQKNNDKGWNFEAIKNFDQKFIDITKKNNNLSLKQNKRYLDDRFINDAILSPGVKRILREATKVFNAILKQFSEEYDVTKVVIELARELSEEKELENTKNYKKLIKKNGDKISEGLKALGISEDEIKDILKSPTKSYKFLLWLQQDHIDPYSLKEIAFDDIFTKTEKFEIDHIIPYSISFDDSSSNKLLVLAESNQAKSNQTPYEFISSGNAGIKWEDYEAYCRKFKDGDSSLLDSTQRSKKFAKMMKTDTSSKYDIGFLARNLNDTRYATIVFRDALEDYANNHLVEDKPMFKVVCINGSVTSFLRKNFDDSSYAKKDRDKNIHHAVDASIISIFSNETKTLFNQLTQFADYKLFKNTDGSWKKIDPKTGVVTEVTDENWKQIRVRNQVSEIAKVIEKYIQDSNIERKARYSRKIENKTNISLFNDTVYSAKKVGYEDQIKRKNLKTLDIHESAKENKNSKVKRQFVYRKLVNVSLLNNDKLADLFAEKEDILMYRANPWVINLAEQIFNEYTENKKIKSQNVFEKYMLDLTKEFPEKFSEFLVKSMLRNKTAIIYDDKKNIVHRIKRLKMLSSELKENKLSNVIIRSKNQSGTKLSYQDTINSLALMIMRSIDPTAKKQYIRVPLNTLNLHLGDHDFDLHNMDAYLKKPKFVKYLKANEIGDEYKPWRVLTSGTLLIHKKDKKLMYISSFQNLNDVIEIKNLIETEYKENDDSDSKKKKKANRFLMTLSTILNDYILLDAKDNFDILGLSKNRIDEILNSKLGLDKIVK

SEQ ID NO: 139 - protein, 1354 aa, Prevotella melaninogenica
MADFAKYQPGMVADGRKIPLDWTLYYLRKKALTQAIRKEELAWILLNFNQKRGYYQLRGEEEEENSTKHEEYYELKVVSVEAAEEGKGGNTWYNVTLENGWIYRRQSKIELNDWVGKVRPFIVTTEYEIDGVTIKKDKNGEVKRSFRAPSENDWGLRKKRTESLLEESGKTVGAFIYNHILSEPADKIRGNFIRTIERKFYKKELEAILREQSKHQKELKDIDTLIACIKELYPNNKPHQDSLIKKDMTYLLITDLIFYQRPLKSKKSLIADCPYEYYEYVIKETGENKRQSIKCIAKSNPYYQEFRLWQFIINLRLFDRNNDKEVTSEYLSSMEDYTRLFTYLNDRKDINQETLLKDFFKQKKVKRGMEKEFPIRWNYIEDKEKKYPCNETRHELLTALGKVGIDHSWLDDKELFYRLWHLLYSVESKEEAEGALRKLVDNDDFVNAFLKIKPFKKEYGAYSEKAIKKLLAVMRMGNLWNEVDICEQTRDRIQNIIKGDIDEKIKDRMGRTFSQLSDFQGLPEWLACYVVYGQHSEATDIQRWTKPENLMAYINGFKQHSLRNPIVEQCILETLRTVHDIWKEAGHIDEIHIELGRGMKSTADQRARMSKSIMQNENTNLRIKSLLMELKNAKEFENVRPYSPMQQEILRIYEEGALQELTKEDAQYNEISKISQMAQPSANELLKYRLWLEQKYCSPYTGKPISLSKLFTSAYQIEHIIPQSRYFDDSFTNKVICEAEVNQLKSNMLGYEFIKKHGGEIVRCTMIGDVKLLDAKEYYNFVTEHYTNNRRKKEKLLMEDIPQEFLNRQMNDSRYISKKVMAILSNIVREEDEQEAKSKFVIACSGGITDRLKQDWGLNDVWNSIVYPRFERLNKLTNTENFGRWENKKGKQVFQTSVPLELQKDFSKKRIDHRHHAMDALVIACASNNIINYLNNESAKSQEKREDLRKKLCDKNRIIRKPWETFTQDAHTALENVVVSFKNYIRVINKATNYYEKYDKNGKKEIAEQKGQDMWAIRKPMHKETVFGQVNLRRKITIKLKDALEKIPAICDKELRDYINILVAKQFNKKQILAHFKSINYRLNMKSVDKVDVWQFSNEKEPMVATRKSVDTSFDTKRIATITDTGIQKILLNYLKAKNNDPNIAFTPEGIAEMNKHITEYNNGKQHQPILKVRVSEPKGAKYQVGETGNKRSKFVEAQKGTNLYFAIYEDKEGNRSYNTIPLNEVIERLKQGLSPVPDANEKSIPLKFHLSPNDLVYVPKTDEENEIKMGQIYKFVDSSGTTANFVPHRVSNLIYNVDKKIAENFCNHEIIQNEYGIGSPQSKNQKSITGEMIKAVCWKLEVDRLGNIHKIIK

SEQ ID NO: 140 - protein, 1130 aa, Streptococcus gallolyticus
MTNGKILGLDIGIASVGVGIIEAKTGKVVHANSRLFSAANAENNAERRGFRGSRRLNRRKKHRVKRVRDLFEKYEIVTDFRNLNLNPYELRVKGLTEQLTNEELFAALRTISKRRGISYLDDAEDDSTGSTDYAKSIDENRRLLKTKTPGQIQLERLEKYGQLRGNFTVYDENGEAHRLINVFSTSDYEKEARKILETQADYNKKITAEFIDDYVEILTQKRKYYHGPGNEKSRTDYGRFRTDGTTLENIFGILIGKCSFYPDEYRASKASYTAQEYNFLNDLNNLKVPTETGKLSTEQKEALVEFAKSTATLGPAKLLKEIAKILDCKVDEIKGYREDDKGKPDLHTFEPYRKLKFNLDSVNIDDLSREVLDKLADILTLNTEREGIEDAIRHNLPNQFTEGQISEIIKVRKSQSTAFNKGWHSFSAKLMNELIPELYATSDEQMTILTRLEKFKVNKKSSKNTKTIDEKEVTDEIYNPVVAKSVRQTIKIINAAVKKYGDFDKIVIEMPRDKNADDEKKFIDKRNKENKKEKDDALKRAAYLYNGTDKLPDEVFHGNKQLETKIRLWYQQGERCLYSGKPIPIQELVHNSNNFEIDHILPLSLSFDDSLANKVLVYAWTNQEKGQKTPYQVIDSMDAAWSFREMKDYVLKQKGLGKKKRDYLLTTENIDKIEVKKKFIERNLVDTRYASRVVLNSLQSALRELGKDTKISVIRGQFTSQLRRKWKIDKSRETYHHHAVDALIIAASSQLKLWEKQDNPMFVDYGNNQVVDKQTGEILSVSDDEYKELVFQPPYQGFVNMISSKGFEDEILFSYQVDSKYNRKVSDATIYSTRKAKIGKDKKEETYVLGKIKDIYSQNGFDTFIKKYNKDKTQFLMYQKDPLTWENVIEVILRDYPTTKKSEDGKNDVKCNPFEEYRRENGLVCKYSKKGKGTPIKSLKYYDKKLGNCIDITPEGSKNEVVLQSLNPWRADVYFNPETLKYELLGLKYSDLSFEKGTGKYHISQEKYDVIKEKEGIGKKSEFKFTLYRNDLILIKDTASGEQEIYRFLSRTMPNVKHYAELKPYDKEKFDNVQELVEALGEADKVGRCIKGLNKSNLSIYKVRTDVLGNKYFVKKEGDKPKLDFKNNKK

SEQ ID NO: 141 - protein, 1371 aa, Streptococcus gallolyticus
MTEKNYSIGLDIGTNSVGWAVITDDYKVPAKKMKVLGNTDKKYIKKNLLGALLFDNGETAEATRLKRTARRRYTRRKNRLRYLQEIFAEEMAKVDESFFYRLDESFLTTDDKDFERHPIFGNKADEIKYHQEFPTIYHLRKHLADSHEKADLRLIYLALAHMIKFRGHFLIEGELNAENTDVQKLFEAFVEVYDRTFDDSNLSEITVDASSILTEKFSKSRRLENLIKHYPTEKKNTLFGNLVALALGLQPNFKTSFKLSEDAKLQFSKDTYEEDLEELIGKIGDEYADLFTSAKNLYDAILLSGILTVADNTTKAPLSASMIKRYNEHQVDLKKLKEFIKNNASDKYDEIFNDKDKNGYAGYIENGVKQDEFYKYLKTTLSKIDGSDYFLDKIEREDFLRKQRTFDNGSIPHQIHLQEMHAILRRQGEHYAFLKENQAKIEKILTFRIPYYVGPLARKNSRFAWAEYHSDEKITPWNFDEIIDKEKSAEKFITRMTLNDLYLPEEKVLPKHSLVYETYTVYNELTKVKYVNEQGKSNFFDANMKQEIFEHVFKENRKVTKDKFLNYLNKEFPEYRIQDLIGLDKENKSFNASLGTYHDLKKILDKSFLDDKTNETIIEDIIQTLTLFEDRDMIRQRLQKYSDIFTPQQLKKLERRHYTGWGRLSYKLINGIRNKENGKSILDYLIDDGYANRNFMQLISDDTLPFKQIIKDAQIIGDIDDVTSVVRELPGSPAIKKGILQSVKIVDELVKVMGHNPDNIVIEMARENQTTNRGRNQSQQRLKKLQDSLKELGSNILNEEKPSYIEGKVENNHLQDDRLFLYYIQNGKDMYTGDELDIDHLSDYDIDHIIPQAFIKDDSIDNRVLTSSAKNRGKSDDVPSLDIVHDRKADWIRLYKSGLISKRKFDNLTKAERGGLTENDKAGFIKRQLVETRQITKHVAQILDSRFNTERDENDKVIRNVKVITLKSNLVSQFRKDFKFYKVREINDYHHAHDAYLNAVVGTALLKKYPKLAPEFVYGEYKKYDIRKFITSSGDKATAKYFFYSNLMNFFKRVIRYSNGKVVVRPVIECSKDTGEIAWNKQTDFEKVRRVLSYPQVNIVKKVETQTGGFSKESILPKGNSDKLIPRKTKKFRWDTPKYGGFDSPNIAYSVFVIADVEKGKAKKLKTVKELVGISIMERSSFEENPVVFLEKKGYQNVQEDNLIKLPKYSLFEFEGGRRRLLASASELQKGNEVVLSRHLVELLYHAHRVNSFNNSEHLKYVSEHKKEFGEVLSCVENFAKSYVDVEKNLGKIRAVADKIDTFSIEDISISFVNLLTLTALGAPADFNFLGEKIPRKRYTSTKECLNATLIHQSITGLYETRIDLSKLGEE

SEQ ID NO: 142 - protein, 1168 aa, Azospirillum sp.
MARPAFRAPRREHVNGWTPDPHRISKPFFILVSWHLLSRVVIDSSSGCFPGTSRDHTDKFAEWECAVQPYRLSFDLGTNSIGWGLLNLDRQGKPREIRALGSRIFSDGRDPQDKASLAVARRLARQMRRRRDRYLTRRTRLMGALVRFGLMPADPAARKRLEVAVDPYLARERATRERLEPFEIGRALFHLNQRRGYKPVRTATKPDEEAGKVKEAVERLEAAIAAAGAPTLGAWFAWRKTRGETLRARLAGKGKEAAYPFYPARRMLEAEFDTLWAEQARHHPDLLTAEAREILRHRIFHQRPLKPPPVGRCTLYPDDGRAPRALPSAQRLRLFQELASLRVIHLDLSERPLTPAERDRIVAFVQGRPPKAGRKPGKVQKSVPFEKLRGLLELPPGTGFSLESDKRPELLGDETGARIAPAFGPGWTALPLEEQDALVELLLTEAEPERAIAALTARWALDEATAAKLAGATLPDFHGRYGRRAVAELLPVLERETRGDPDGRVRPIRLDEAVKLLRGGKDHSDFSREGALLDALPYYGAVLERHVAFGTGNPADPEEKRVGRVANPTVHIALNQLRHLVNAILARHGRPEEIVIELARDLKRSAEDRRREDKRQADNQKRNEERKRLILSLGERPTPRNLLKLRLWEEQGPVENRRCPYSGETISMRMLLSEQVDIDHILPFSVSLDDSAANKVVCLREANRIKRNRSPWEAFGHDSERWAGILARAEALPKNKRWRFAPDALEKLEGEGGLRARHLNDTRHLSRLAVEYLRCVCPKVRVSPGRLTALLRRRWGIDAILAEADGPPPEVPAETLDPSPAEKNRADHRHHALDAVVIGCIDRSMVQRVQLAAASAEREAAAREDNIRRVLEGFKEEPWDGFRAELERRARTIVVSHRPEHGIGGALHKETAYGPVDPPEEGFNLVVRKPIDGLSKDEINSVRDPRLRRALIDRLAIRRRDANDPATALAKAAEDLAAQPASRGIRRVRVLKKESNPIRVEHGGNPSGPRSGGPFHKLLLAGEVHHVDVALRADGRRWVGHWVTLFEAHGGRGADGAAAPPRLGDGERFLMRLHKGDCLKLEHKGRVRVMQVVKLEPSSNSVVVVEPHQVKTDRSKHVKISCDQLRARGARRVTVDPLGRVRVHAPGARVGIGGDAGRTAMEPAEDIS

SEQ ID NO: 143 - protein, 1345 aa, Streptococcus mutans
MKKPYSIGLDIGTNSVGWAVVTDDYKVPAKKMKVLGNTDKSHIKKNLLGALLFDSGNTAADRRLKRTARRRYTRRRNRILYLQEIFAEEMSKVDDSFFHRLEDSFLVTEDKRGERHPIFGNLEEEVKYHENFPTIYHLRQYLADNPEKVDLRLVYLALAHIIKFRGHFLIEGKFDTRNNDVQRLFQEFLAVYDNTFENSSLQEQNVQVEEILTDKISKSAKKDRVLKLFPNEKSNGRFAEFLKLIVGNQADFKKHFELEEKAPLQFSKDTYEEELEVLLAQIGDNYAELFLSAKKLYDSILLSGILTVTDVSTKAPLSASMIQRYNEHQMDLAQLKQFIRQKLSDKYNEVFSDVSKDGYAGYIDGKTNQEAFYKYLKGLLNKIEGSGYFLDKIEREDFLRKQRTFDNGSIPHQIHLQEMRAIIRRQAEFYPFLADNQDRIEKILTFRIPYYVGPLARGKSDFAWLSRKSADKITPWNFDEIVDKESSAEAFINRMTNYDLYLPNQKVLPKHSLLYEKFTVYNELTKVKYKTEQGKTAFFDANMKQEIFDGVFKVYRKVTKDKLMDFLEKEFDEFRIVDLTGLDKENKAFNASYGTYHDLRKILDKDFLDNSKNEKILEDIVLTLTLFEDREMIRKRLENYSDLLTKEQVKKLERRHYTGWGRLSAELIHGIRNKESRKTILDYLIDDGNSNRNFMQLINDDALSFKEEIAKAQVIGETDNLNQVVSDIAGSPAIKKGILQSLKIVDELVKIMGHQPENIVVEMARENQFTNQGRRNSQQRLKGLTDSIKEFGSQILKEHPVKHSQLQNDRLFLYYLQNGRDMYTGEELDIDYLSQYDIDHIIPQAFIKDNSIDNRVLTSSKENRGKSDDVPSKNVVRKMKSYWSKLLSAKLITQRKFDNLTKAERGGLTDDDKAGFIKRQLVETRQITKHVARILDERFHTETDENNKKIRQVKIVTLKSNLVSNFRKEFELYKVREINDYHHAHDAYLNAVIGKALLGVYPQLEPEFVYGDYPHFHGHKENKATAKKFFYSNIMNFFKKDDVRTDKNGEIIWKKDEHISNIKKVLSYPQVNIVKKVEEQTGGFSKESILPKGNSDKLIPRKTKKFYWDTKKYGGFDSPIVAYSILVIADIEKGKSKKLKTVKALVGVTIMEKMTFERDPVAFLERKGYRNVQEENIIKLPKYSLFKLENGRKRLLASARELQKGNEIVLPNHLGTLLYHAKNIHKVDEPKHLDYVDKHKDEFKELLDVVSNFSKKYTLAEGNLEKIKELYAQNNGEDLKELASSFINLLTFTAIGAPATFKFFDKNIDRKRYTSTTEILNATLIHQSITGLYETRIDLSKLGGD

SEQ ID NO: 144 - protein, 1024 aa, Helicobacter mustelae
MIRTLGIDIGIASIGWAVIEGEYTDKGLENKEIVASGVRVFTKAENPKNKESLALPRTLARSARRRNARKKGRIQQVKHYLSKALGLDLECFVQGEKLATLFQTSKDFLSPWELRERALYRVLDKEELARVILHIAKRRGYDDITYGVEDNDSGKIKKAIAENSKRIKEEQCKTIGEMMYKLYFQKSLNVRNKKESYNRCVGRSELREELKTIFQIQQELKSPWVNEELIYKLLGNPDAQSKQEREGLIFYQRPLKGFGDKIGKCSHIKKGENSPYRACKHAPSAEEFVALTKSINFLKNLTNRHGLCFSQEDMCVYLGKILQEAQKNEKGLTYSKLKLLLDLPSDFEFLGLDYSGKNPEKAVFLSLPSTFKLNKITQDRKTQDKIANILGANKDWEAILKELESLQLSKEQIQTIKDAKLNFSKHINLSLEALYHLLPLMREGKRYDEGVEILQERGIFSKPQPKNRQLLPPLSELAKEESYFDIPNPVLRRALSEFRKVVNALLEKYGGFHYFHIELTRDVCKAKSARMQLEKINKKNKSENDAASQLLEVLGLPNTYNNRLKCKLWKQQEEYCLYSGEKITIDHLKDQRALQIDHAFPLSRSLDDSQSNKVLCLTSSNQEKSNKTPYEWLGSDEKKWDMYVGRVYSSNFSPSKKRKLTQKNFKERNEEDFLARNLVDTGYIGRVTKEYIKHSLSFLPLPDGKKEHIRIISGSMTSTMRSFWGVQEKNRDHHLHHAQDAIIIACIEPSMIQKYTTYLKDKETHRLKSHQKAQILREGDHKLSLRWPMSNFKDKIQESIQNIIPSHHVSHKVTGELHQETVRTKEFYYQAFGGEEGVKKALKFGKIREINQGIVDNGAMVRVDIFKSKDKGKFYAVPIYTYDFAIGKLPNKAIVQGKKNGIIKDWLEMDENYEFCFSLFKNDCIKIQTKEMQEAVLAIYKSTNSAKATIELEHLSKYALKNEDEEKMFTDTDKEKNKTMTRESCGIQGLKVFQKVKLSVLGEVLEHKPRNRQNIALKTTPKHV

SEQ ID NO: 145 - protein, 765 aa, Butyrivibrio fibrisolvens
MGITIGLDLGVASVGWAVVNDDYEILESCSNIFPSADASKNSERRGFRQGRRLTRRRKNRIHDFQKLWEDKGFVIPSQGTEDVLAIKIKGLSEKLSVDEVYWVLLNSLKHRGISYLDDADSGDNSSDYAKSISRNEEELKEKLPCEIQWERLQKYGAYRGNISIVEDGEPITLRNVFTTSAYKKEVEQFIDTQAKYNAQYSGDFKADYLEIFNRKREYYEGPGNELSRTDYGKYTTEINADGEYITVDNIFDKLVGKCSVNPDERRAAGASYTAQEFNVLNDLNNLTISSESSFIEDGKLTEDAKRKIIETIKNAKTVNVKKIICDVIGDKKCQISGARIDKNEKEIFHSFEAYNKMRRALEEIGFDISSLSRENLDLIGDILTLNTDRESILNAFNRKGIELADEAKDILVKVRKTNGSLFNKWQSFGLSIMNELIPELYAQPKNQMELLTAMGVFKSRGDRFLECKEIPGDLIVDDIYNPVVSKTVRITVRILNALIKKYGYPDRVVIEMPRDKNSDEEQQRLKKEQRDNENEIKDIKARVKTEYGREITEEDFRQHSKLSLKLKLWNEQQGICPYSGKSIKIDDLLDNPNLFEVDHIIPLSISFDDSRNNKVLVYSSENQDKGNRTPLAYLASVNRQWDIHSFMDYVLKTYAGAQKRKKRDNLLNEQDITKVEVLQGFVNRNINDTRYASKVVLNSLQEYFSSKECSTKVKVIRGSFTHQMRVNLKLKKTVMNHMFIMQLMQCLLLFHRWDMTLIMNLQISI

SEQ ID NO: 146 - protein, 1338 aa, Coprococcus catus
MKQEYFLGLDMGTGSLGWAVTDSTYQVMRKHGKALWGTRLFESASTAEERRMFRTARRRLDRRNWRIQVLQEIFSEEISKVDPGFFLRMKESKYYPEDKRDAEGNCPELPYALFVDDNYTDKNYHKDYPTIYHLRKMLMETTEIPDIRLVYLVLHHMMKHRGHFLLSGDISQIKEFKSTFEQLIQNIQDEELEWHISLDDAAIQFVEHVLKDRNLTRSTKKSRLIKQLNAKSACEKAILNLLSGGTVKLSDIFNNKELDESERPKVSFADSGYDDYIGIVEAELAEQYYIIASAKAVYDWSVLVEILGNSVSISEAKIKVYQKHQADLKTLKKIVRQYMTKEDYKRVFVDTEEKLNNYSAYIGMTKKNGKKVDLKSKQCTQADFYDFLKKNVIKVIDHKEITQEIESEIEKENFLPKQVTKDNGVIPYQVHDYELKKILDNLGTRMPFIKENAEKIQQLFEFRIPYYVGPLNRVDDGKDGKFTWSVRKSDARIYPWNFTEVIDVEASAEKFIRRMTNKCTYLVGEDVLPKDSLVYSKFMVLNELNNLRLNGEKISVELKQRIYEELFCKYRKVTRKKLERYLVIEGIAKKGVEITGIDGDFKASLTAYHDFKERLTDVQLSQRAKEAIVLNVVLFGDDKKLLKQRLSKMYPNLTTGQLKGICSLSYQGWGRLSKTFLEEITVPAPGTGEVWNIMTALWQTNDNLMQLLSRNYGFTNEVEEFNTLKKETDLSYKTVDELYVSPAVKRQIWQTLKVVKEIQKVMGNAPKRVFVEMAREKQEGKRSDSRKKQLVELYRACKNEERDWITELNAQSDQQLRSDKLFLYYIQKGRCMYSGETIQLDELWDNTKYDIDHIYPQSKTMDDSLNNRVLVKKNYNAIKSDTYPLSLDIQKKMMSFWKMLQQQGFITKEKYVRLVRSDELSADELAGFIERQIVETRQSTKAVATILKEALPDTEIVYVKAGNVSNFRQTYELLKVREMNDLHHAKDAYLNIVVGNAYFVKFTKNAAWFIRNNPGRSYNLKRMFEFDIERSGEIAWKAGNKGSIVTVKKVMQKNNILVTRKAYEVKGGLFDQQIMKKGKGQVPIKGNDERLADIEKYGGYNKAAGTYFMLVKSLDKKGKEIRTIEFVPLYLKNQIEINHESAIQYLAQERGLNSPEILLSKIKIDTLFKVDGFKMWLSGRTGNQLIFKGANQLILSHQEAAILKGVVKYVNRKNENKDAKLSERDGMTEEKLLQLYDTFLDKLSNTVYSIRLSAQIKTLTEKRAKFIGLSNEDQCIVLNEILHMFQCQSGSANLKLIGGPGSAGILVMNNNITACKQISVINQSPTGIYEKEIDLIKL

SEQ ID NO: 147 - protein, 1035 aa, Candidatus Puniceispirillum
MRRLGLDLGTNSIGWCLLDLGDDGEPVSIFRTGARIFSDGRDPKSLGSLKATRREARLTRRRRDRFIQRQKNLINALVKYGLMPADEIQRQALAYKDPYPIRKKALDEAIDPYEMGRAIFHINQRRGFKSNRKSADNEAGVVKQSIADLEMKLGEAGARTIGEFLADRQATNDTVRARRLSGTNALYEFYPDRYMLEQEFDTLWAKQAAFNPSLYIEAARERLKEIVFFQRKLKPQEVGRCIFLSDEDRISKALPSFQRFRIYQELSNLAWIDHDGVAHRITASLALRDHLFDELEHKKKLTFKAMRAILRKQGVVDYPVGFNLESDNRDHLIGNLTSCIMRDAKKMIGSAWDRLDEEEQDSFILMLQDDQKGDDEVRSILTQQYGLSDDVAEDCLDVRLPDGHGSLSKKAIDRILPVLRDQGLIYYDAVKEAGLGEANLYDPYAALSDKLDYYGKALAGHVMGASGKFEDSDEKRYGTISNPTVHIALNQVRAVVNELIRLHGKPDEVVIEIGRDLPMGADGKRELERFQKEGRAKNERARDELKKLGHIDSRESRQKFQLWEQLAKEPVDRCCPFTGKMMSISDLFSDKVEIEHLLPFSLTLDDSMANKTVCFRQANRDKGNRAPFDAFGNSPAGYDWQEILGRSQNLPYAKRWRFLPDAMKRFEADGGFLERQLNDTRYISRYTTEYISTIIPKNKIWVVTGRLTSLLRGFWGLNSILRGHNTDDGTPAKKSRDDHRHHAIDAIVVGMTSRGLLQKVSKAARRSEDLDLTRLFEGRIDPWDGFRDEVKKHIDAIIVSHRPRKKSQGALHNDTAYGIVEHAENGASTVVHRVPITSLGKQSDIEKVRDPLIKSALLNETAGLSGKSFENAVQKWCADNSIKSLRIVETVSIIPITDKEGVAYKGYKGDGNAYMDIYQDPTSSKWKGEIVSRFDANQKGFIPSWQSQFPTARLIMRLRINDLLKLQDGEIEEIYRVQRLSGSKILMAPHTEANVDARDRDKNDTFKLTSKSPGKLQSASARKVHISPTGLIREG

SEQ ID NO: 148 - protein, 1270 aa, Mycoplasma gallisepticum
MNNSIKSKPEVTIGLDLGVGSVGWAIVDNETNIIHHLGSRLFSQAKTAEDRRSFRGVRRLIRRRKYKLKRFVNLIWKYNSYFGFKNKEDILNNYQEQQKLHNTVLNLKLEALNAKIDPKALSWILHDYLKNRGHFYEDNRDFNVYPTEELANYFDEFGYYKGIIDSKNDDDDKLEEGLTKYKFSNQHWLEEVKKVLSNQTGLPEKFKEEYESLFSYVRNYSEGPGSINSVSPYGIYHLDEKEGKVVQKYNNIWDKTIGKCSIFPDEYRAPKNSPIAMIFNEINELSTIRSYSIYLTGWFINQEFKKAYLNKLLDLLIKTNSEKPIDARQFKKLREETIAESIGKETLKDVESEEKLEKDDHKWKLKGLKLNTNGKIQYNDLSSLAKFVHKLKQHLKLDFLLEDQYTPLDKINFLQSLYVYLGKHLRYSNRVDSANLKEFSDSSRLFERVLQEQKDGLFKLFEQTDKDDEKILTQTHSLSTKAMLLAITRMTNLDNDEDNQKNNDKGWNFEAIKNFDQKFIDITKTNNNLSLKQDKRYLDDQFINDAILSPGVKRILREATKVFNAILKQFSEEYDVTKVVIELARELSEEKELENTKNYKKLIKKNGDKISEGLKALGIAEDKIEEILKSPTKSYKVLLWLQQDHIDPYSQKEIAFDDILTKTEKTEIDHIIPYSISFDDSSSNKLLVLAESNQAKSNQTPYEFINSGKAEITWEVYEAYCHKFKNGDSSLLDSTQRSKKFAKMMKTDTSSKYDIGFLARNLNDTRYATIVFRDALKDYANNHLVEDKPMFKVVCINGGVTSFLRKNFDPKSWYAKKDRDKNIHHAVDASIISIFSNETKTLFNQLTKFADYKLFKNTDGSWKKIDPKTGVVSEVTDENWKQIRVRNQVSEIAKVIDKYIQDSNIERKARYSRKIENKTNISLFNDTVYSAKKVGYEDQIKRKNLKTLDIHESAEENKNSKVKKQFVYRKLVNVSLLNNDKLADLFAEKEDILMYRANPWVINLAEQIFNEYTENKKIKSQNVFEKYMLDLTKEFPEKFSEAFVKSMIRNKTAIIYNVEKDVVHRIKRLKILSSELKENKWSNVIIRSKNESGTKLSYQDTINSIALMIMRSIDPTAKKQYIRVPLNTLNLHLGDQDFDLHNIDAYLKKPKFVKYLKANEIGDEYKPWRVLTSGTLLIHKKDKKLMYISSFQNLNDLIEIKNLIETEYKENVDSDPKKKKKASQILRSLSVILNDYILLDAKYNFDILGLSKNKIDEILNSKLDLDKIAK

SEQ ID NO: 149 - protein, 1204 aa, Prevotella ruminicola
MERILGIDTGTNSLGWAIVDKDENQYHLVAKGTNIFSEGVKIEKGIESSKAAERTEHRSVRKHYWRRKIRKIRLLTILSDNDLCPRLKHEQLRQWRLKKVYPTDDTFMEWQRTEDKAQVNPYKFRYICLTQKLDLSDITQRFILGRALYHLNQRRGFLSNRKEATKESEGTVKEGISSLSKDMKDSGCEYLGEYFYQLYQQGKKIRNHYTARKEHYLKEFKAICSKQELDDALIEKLEKAIFDQRPLKSQKGQVGTCTFEKGKSRCPSSHPLYEDFRMYSFINNIKVQVDTLYDKGERSLTDEEKQLIIPLFKRKSKRTFPFEDIAKKIAGKNNYCYIKSNEEKAYKFNYQMDTQVSGSPVNAQLEEIFGEDWLSSVCEVYTLANNKSRFQIMNDVWHVLFFYDDEDKLKEFAKDRLQLDDELAEKFSKISIPNDYAALSLKAIRKIMPYLRDYGLIYSEAVFLANLVDVLPQHVWGIKEMREAAIENVIDVMHSYDKNNIDGITLEGCVKTFLKERYQVSDDNLKKLYHPSMLDPYPRQRPNDEGVFQLGSPRISSVKNPMAMHSLFRLRKVVNLMLKKGYITPDTKVHIEFSRDLNDANKRWAIQTWQRENEKERERCRKEIEKYIASPSDTDILKYQLWEEQNHKCLYTGDEIRITDFLGDNPKYDIEHTIPRSAGGDSTKMNLTLCSSRFNRDEKKTKLPAELVNHDEILERISNWKEKYEDIDKQIRKISTKGATSKEDKDSKIRRRHYLILQRDYWRGKYQRFTMTEVPEGFSRRQGTDISVISRYARMYLKSVFKQVYIVKGIATSDFRKMWGIQDEYAKKERVNHVHHCIDAITIACIGKAEYDKLADYRHQYDDYLFQGKTKPTFDKPWPSFVIDIKHIQDELLIAHYAKDNLEKFTKKNLRGKDGRIIRDKFGNKLQMKGDTSRNSLHNDKFYGAINHEGEIKYVYRTNIEALDAKSIGNIVDPTVRSIIESAIAIHGSLKAAINKGIWMNEEKHIPIKKVRVFRNDVKKPIELKDQRDLSDKDYKQHYYVTNDGNYMMLIFSKLNNKGREIRQHVVINSLEATEVIKSHKRSQVGKVVWESYYSKEGFDLIYKLKSGTMILLYENNRDEVWDLDIRNLQKRLYIITKMKYDGRIYMMHHQEAREKKDLEEKSGSFKINEDYRPLIVNSYNQFNALVQDLDFEINDLGEIRRLI

SEQ ID NO: 150 - protein, 1178 aa, Scardovia inopinata
MGKRHNSNMAKKKISYRIGIDVGLNSTGLAAIEVDDDGAPIRILNTMSVIHDGGVDPDAAKVRGTRLAISGIARRTRRMRRRRAKRLDRLEQILEKYGYTDTEPVLEEPYGPWICRAELADGFINDDEQRRMMIGIAIRHIARHRGWRNPYQNVRALLNIDDSDLSEEYKNLKEKVQDQINDGKDLPNFTPSQLVRDYLDNFSGQPAARIRTGKAGPRGNRRDAVGILPQRMRQSDYAYELQRIFDMQKIGRDEAQELLMAVFEAKSPKGSAEKRIGKDPLTGKKRALKASLAFQKYRIVATITNLRIKTGTGSERMLSPTELNDIYTYLLRVQDDNHLPTWEDICEEVLHIGRYQLAGIGKTFEGGERISNMPPVIQTSLAIHGLSEGTLAEKLTKWWDKADDDSRESMIKLLSNTVDIDRVNEVDENFASALDFIDSLDDEELTKLDKIALPRGRAAYSEEALNKLTADMLNTGDDLFSARQRIYHVNNSWRPPQPPIGEPLGNPAVDRVLKITNRYLMNCLNRWGQPRRVTIEHTRSGFTSVKQATEHQKISDKRAEYRRDIVKQLEEAGVESVHEYDIRRWEAVQRQNGQCLYCGRDITFKTCEMDHIVPRKGPGSTNTRTNFAAVCPECNRMKSNIPFASWAETKEAKDRGVSLDKAIKQVRFFNFTKNEYSPQAQRNFKKSMIERLKQKTSDEPLDNRSIESVSWMADELYKRIDWYFNHEQYETSKKAINDDKDNLSGTQVVVYPGSITAEARNAAGLGGNIHFIGGRYKTRLDRRHHAVDACVIAMMEPGIARILTERNQLRQAQRLTARIEDDEVNWKDYPTENTAGYNKYQAWSDRMHALLEYMNNALDYDKIPVVRWERLQLGNRSAHEDTIHPLKKLPLSHEISAIDINHASTPALYEALVSLPDFSEQDGLPADPSRQINVNGERYSGDDLVSFFNSNAAQIAIQGGSAELGTAFHHARIYRCWTVGKNGKKKIFFGMIRVYQHDLLHAKNEDLFTYPLKRSSVSMRYAKKEVVHAILSGNAEYVGYLCVGDELVLDLKGDKSNDEGGSRLSGQVGEFVQKFEEDSKVNSQIVNRWTVDGFPDEAKLRLRPSMFAGEGLKNMKSELVENAAIKNILSKTGWRVSVDVISKKSPVVLRRNAFGEPRWKTNAGLPVSYRWQDTETKE

SEQ ID NO: 151 - protein, 1371 aa, Gordonibacter pamelaeae
MNLRNVESYQVGLDIGTGSVGWAVLDDNGDLCRFKGKPTWGSRVFPTAETAAEARVHRGQRRRYDRRRQRIDLLQRFFADEVAKVDPEFFIRLNQARLHPENRDPAHADYRWPLFNGSNFTEKDYYRQFPTIYHLRAHLLKSDEPADIRLVYLALHNIVKHRGNFLHQDNPSLSARNANVGDAVEALCLALDEWCGAHDVECACDEAALAEALGDASLRPGEKRERAEAALGVEKAHKKLAKAVSSAVVGYAAEFGHVFFAESEGSKFALSNDEKVEAYVCPDEGRDLFDAMRAVHSSYVLMGILSEAQGELLSVCKVGEYERYKRDLETLKSLVRAYGPERYDEFFCGPFYEGTRDYDPGKAQGYTKYNLGASKLSHEDFLKEVQKLLKDIGAQADERYADIERAIEAGAFLRRLKTSDNGTIPYQLHLEEMDAIIERQAAFYPFLAQEKDKLKSLVSFRIPYYVGPLTQKNAARDGKGEARFAWSSRKPGMEDARVYPWNWEDVIDKDQSAEDFIRRMTGTCTYLKGEPVLARCSLDYELFCVLNELAGARWTQDGDKSYRFDAADRLGIVEDLFKKRKRVTYEAAEKWLARTHGPESGKSAGGAYHVSGGQGEDAFESQLSSHYDFCKILGVDELSDADEAMAEDIILWNTVFEDRSILKRKIKLAYGDRLGDAQVRKLCQKRYTGWGRLSGELLRGLRSATDNGPKTIMDILLEGDPNHARRMGAAMNLMEILHDDLLEFQAKIDEHNRERALAVGGMSVDEVTGSPALRRGINQALRVVDEIAGIAGKPPAHIYVEVTRDEGARNKGRRTTSRYRALEAALSSIKAQCADVYAELKERDPRALDDERLTLYFMQCGKCMYSGDALDINKLQTYQVDHILPQSYVKDDSFENKVLVRPDTNQRKGDTLLLDERLIARMRGFWRTLRDAELIGEKKFNNLTRTSVSDEQMKKFVSRQLVETGQMVKQVQQLLQARYPESEVQPVKAGVSHQLRVGCALAKSREINDFHHAHDAYLACQVGRFVQYRHSAVYSEPVKMAAVVKQFIKKQAEDYRRTRELPGSDGFIVSSFMTPGFDVKTGEVFRDAWDAGAEIDRIRRCFDYKDCFISRMPEETHGAFWDATIYSPRAAGKTLSLPLKRGLDPRKYGSYSREQFAYFFVYEAVKPKKKQRVLEFAPVPVRVASALANDPDALEDYARELAEAEGLVFERIRRRKVYKYQQIIVGDSRLYVTGREEVRNARQLAFSQDETKLICRIEQGEECEEGELLDLFRSMQRKYLACAPRLARLMKVAEMEEGFIAATASGKREVLLSLTSIAAAHRNSIDLKPIGRKGSSGQMKITFSKELSTNGILFVDSSVTGMFERRCRLGL

SEQ ID NO: 152 - protein, 1388 aa, Zunongwangia profunda
MKRILGLDLGTNSIGWALVNEAENEKEISKIIKLGVRVNPLTIDEKTNFEKGRPLSTNADRTLKRGARRNLQRYKLRRENLIEILIDNHIITKETPLTEIGKGTTYQTLSLRAKAVRERIDLEDFAKVLLAINKKRGYKSSRKASNDEEGQAIDGMAIAKELYERGITPGQYVLELLENDRKYIPDFYRSDLKQEFNKIWNNQKTFYPEILTDELFKELDGKNKSQTWAICQKPFNIKGIKRITKGREKTIENYHWRVKGLSGKLNLEKLAIILQEINNDINQSSGYLGGISDKSKKLYLNKETVGEFLYKQIAKNPHTSLKNQVFYRHDYLDEFEQIWKTQSNFNANLTDELKQEIRDVIIFYQRKIKSQKSLISFCQFESWEQEYFDKETGKTKTRTVGRRVIPKSSPLFQEFKIWQNLNHLVFTNSETDEKIEIKEVEQEIRKELFEELNLRGDLNPNDLLKILRSQFKIGKLSNWKCNFEKIEGNRTNAALFNIYQKISDFEGYGIDWNKSNAKKIRKELKATFPEIGIDASILEFDAYKKQLTNQSSYELWHLLYSAEEDFKISEQDKLIYGNSSVSLKKKLHLKFGFNPEYAKMLANLSLMSDYGNLSAKAIKKILPYLEDGHLYSEACRLAGYNHSKSLTAEELEKFEPKAKLDLLKKNSLRNPVVEKILNQMVNVVNQVIDTYGKPDGVRIELARELKKSAKERAEMTKGIADGTRRNEEIKKIITQKFGIPNPTKSDLVRYRLWQELESRGYKDIFTDKYISPDKIFSSEIDIEHIIPKALLFDDSFSNKTLSFRNVNLKKANRTALDFITQDYQSNVEAYKERVETWNKDNHISKGKRNKLLMSLKDIPDGFIERDLRNSQYIARKAKRMLYEVFPNEVLATSGSITDKLRSDWDLINVMKELNLPKYKALGLTEYEERLDKGTEELFKHEVIKDWTKRNDHRHHAMDALAVAFTTHNHIQYINNLNARKDITQDNHPIIKNIENLITEVNSKGKRVFKAPMSSFRESAKEQIEAILVSFKNKNKVVTKNINQTKKEGGFNYQNAKTPRGQLHKETIYGKSKQPLEKPVKINNRFCKKQVGLIINFKEQEAVLHHLKKYDNNEKIAFSNKTLKSDPIQVNGSPLREVKIFEEIFTIRKDINPDNFKTQKHLDKIIDKGIKEVMKKRLEEYNGDFKTAFSDLDKNPIWLNQSKGITIKRATISGVTNAEPLHQAKDHLGNIILDDNGKEIPIDYVSTGNNHHVAIYQDESGNLQEEVVSFYEAVIRKNQDQPIIKKRHPKGWKFLFTMKQNEMFVFSSENFNPSEIDLLDEKNAAIISPNLFRVQKIATKNYMFRHHLETEVTNNLDFTYRHFQATEWLRNLCKVRIDHIGRIVQIGEY

SEQ ID NO: 153 - protein, 1082 aa, Methylosinus trichosporium
MRVLGLDAGIASLGWALIEIEESNRGELSQGTIIGAGTWMFDAPEEKTQAGAKLKSEQRRTFRGQRRVVRRRRQRMNEVRRILHSHGLLPSSDRDALKQPGLDPWRIRAEALDRLLGPVELAVALGHIARHRGFKSNSKGAKTNDPADDTSKMKRAVNETREKLARFGSAAKMLVEDESFVLRQTPTKNGASEIVRRFRNREGDYSRSLLRDDLAAEMRALFTAQARFQSAIATADLQTAFTKAAFFQRPLQDSEKLVGPCPFEVDEKRAPKRGYSFELFRFLSRLNHVTLRDGKQERTLTRDELALAAADFGAAAKVSFTALRKKLKLPETTVFVGVKADEESKLDVVARSGKAAEGTARLRSVIVDALGELAWGALLCSPEKLDKIAEVISFRSDIGRISEGLAQAGCNAPLVDALTAAASDGRFDPFTGAGHISSKAARNILSGLRQGMTYDKACCAADYDHTASRERGAFDVGGHGREALKRILQEERISRELVGSPTARKALIESIKQVKAIVERYGVPDRIHVELARDVGKSIEEREEITRGIEKRNRQKDKLRGLFEKEVGRPPQDGARGKEELLRFELWSEQMGRCLYTDDYISPSQLVATDDAVQVDHILPWSRFADDSYANKTLCMAKANQDKKGRTPYEWFKAEKTDTEWDAFIVRVEALADMKGFKKRNYKLRNAEEAAAKFRNRNLNDTRWACRLLAEALKQLYPKGEKDKDGKERRRVFSRPGALTDRLRRAWGLQWMKKSTKGDRIPDDRHHALDAIVIAATTESLLQRATREVQEIEDKGLHYDLVKNVTPPWPGFREQAVEAVEKVFVARAERRRARGKAHDATIRHIAVREGEQRVYERRKVAELKLADLDRVKDAERNARLIEKLRNWIEAGSPKDDPPLSPKGDPIFKVRLVTKSKVNIALDTGNPKRPGTVDRGEMARVDVFRKASKKGKYEYYLVPIYPHDIATMKTPPIRAVQAYKPEDEWPEMDSSYEFCWSLVPMTYLQVISSKGEIFEGYYRGMNRSVGAIQLSAHSNSSDVVQGIGARTLTEFKKFNVDRFGRKHEVERELRTWRGETWRGKAYI

SEQ ID NO: 154 - protein, 1186 aa, Gardnerella vaginalis
MEGNISYAIGIDVGLNSVGLAAIRLDNNGEPIRILKAMSVIHDAGIDPNGAKESDTRKAISGVARRVRRLYRQRRRRLQKLDFLLHSLGFPVVENKDLDFSDSFTPWIFRAKLADEYIADEKQRKQMLSVAIRHIARHRGWRNPYQSIKSMTQETEYSEFYNELLKNIEKFAPGVSCEGSTPAQLVRDYLLSQQGKASRRLRITTDDRRKNHPNSLDPVLPRKLMQSDNMLEILNIFNVQHIDNKYVREQIINAVFYAKSPRGSAENRVGKDAITGKGKRALKASLAFQKYRIISTISNLRIRENSKERCLTIEEKQSVYKLLTTSTDEYSKEKSAEAPLYTWIDVADCLGIERYKLRGVGSQIEDGESVGNRPPMLNSELAILYANAKSLKQSLITWWLAANRTQEDKEAFIEILSNTVDIEAIHDNPEYQDKYGSVIAFIDSMDETEIAALENISLPNGRAAYSLETLDKLNKQMLETDDDLFEARKKLFNLPNNWRPSEAPIAEPTGNPSVDRVLKIVHRFLISAKNRWGNPERINIEHVRSGFQSKKMANSYKKLLDKRTEGKENLKAMMRNSLHLGTSDSISDADIRRYEAVQRQNGQCLYCGSEITYHTCELDHIVPRKGPGSTNTRENLVATCSSCNAQKCNTPFATWCEESTYCKNHDISVDSAINRVRAFIFPPNSYDKRGASQFKKEVIARLKQKVGDEAFDNRSIESVAWMANELHRRIDWYYNSQNYQTNNGISDITNKAQTNVGVYAGSLTAIARRMSGIDGKLEFFDGRRKTRFDRRHHAVDASVIAMMTPGIAQILAIKCNLRETQLLQGNKVVPGGIDWKEYPTANDQGYQQYANWSVRMNALLELLNEEMRADRIAVVNSIRLRYSNSSVHKDDVHALLKLHVGDEIDSETIRRASTPALYCALTRNPDYDVNNGLPENTDRTILLHDKKLNADDSITFFKSKAAQLFVREGSVEIGNSIHHLRIYEYFEKLKSGKVKKSYGMIRVFQDDLHRYIHEDLFSCDLPEQSISMRYADTKVAHAVQTGNANYLGYLVPGDEIIVDFSHVKLSGYIGEFVEFLNKIGANCAAYKHWVVAGTDDKTTLILKPSMISSEGIDKLYSNCERNNFDYASYEKSIDKILVDKGWRVSVNVLDQYKAATIRRNALGEPRWASRSHLPISWSWDTGENRE

SEQ ID NO: 155 - protein, 1434 aa, Bacteroidetes oral
MKNILGLDLGTNSIGWAYVKQAQNDSEKSEIAELGVRVNPLTVDEKTNFEKGKPISTNADRTLKRGARRNLQRYKLRRQELIELLKDYQVISDKTILAEDGKETTFETLRLRVKSAKEQVSLEELARILLMINKKRGYKSSRKAKNEDEGQLIDGMEIARRLYDENLTTGQLSLQLLKEGKKSLPDYYRSDLQHELDKVWNFQKQFHPDILTDEFYTSIQGKGQKATRESFSSKYGIDTAENKGSREEKKLQAYQWRADATHKELTKEELAFVITEINNNINNSSGYLGAISDRSKELIFANETVGEYLWKQIQNDPHTSLKNQVFYRQDYFDEFERIWETQSGFYPQILTESLKNELRDILIFYQRKLKSQKALVSICEFESKEIPLKDKQGNPISKNGIPVTKLVGPKVAPKSSPLFQEFKIWQNLNNVLVRPKGSRKRKVTTNQQSTLLEGQEPVFELNLEQKELLFEELNLKGNLKTDYCLELIGYSAKEWEMNYPTLEGNKTNKALYEAYLKIIDSEGYDAKKLLKVKTDKDDINLDDIKVSASEIKTMISDIFNELGINTKILDFDAELERKQFEAQASYRLWHLLYSYEGDDSKSGNELLYRLLEDKFGFKREHSKTLANVSLLSDYGNLSTKAIRTIYPYIKENKFSTACELAGYRHSKLSISKEENENRTLKDTLDVLKKNSLRQPVVEKILNQMINLINELIEKHSEKDEKGNIVKYFKFDEIHIELARELKKNAEERRELDSKVREGKDRNEKIITILKSEFGLPYPTKNDITRYRLYEELKDNGYKDLYTNTYIPREKLFSKEIDIEHIIPKSRLFNDSFSNKTICYRQDNLNKGERTAYDYIEGLGKTQLDEYLNRVENLYTNKFITKAKYRNLLKKESEIGDGFIERDLRETQYIAKKAKEMLLQITRHVVSTTGSITDRLRDDWELVNVMRELNLPKYKVLGLTEIQERKNGQTVEVITDWTKRNDHRHHAMDALTVAFTKHSHIQYLNFLNARKDEKHKEYSNIMGIQQLETEKTTDKDGKDRRVFKTPIPNFRQVAKEHLESILISHKTKNKVVTRATNKIAGSKKQQETLSPRGQLHKETVYGKYRRYVQKEEKIGSKFDLQTIERVANPLYKRLLTKRLEENGGDPKKAFTGKNALAKSPIYLDETQTQQLPEKVKLVWLETDFSIRKDITPDNFKDEKSIDKVLDEGIKRILKDRLKSFDGDAKRAFTDLEQNPIWLNKEKGIAIKRVTISGVSNAEPLHTKKDHLGNEIFDDTGKPIPVDYVSTGNNHHIAIYRDENGNLQEKAVSFFEAVTRANQGLPTVDKTYNQHLGWQFLFTMKQNEMFVFPNKETGFDPQEIDLLDPKNKKLISPNLFRVQKISTKNYFFRHHLETSVETHNALNGVTYKSQLGLNGITDIIKVRINHLGDIVHIGEY

SEQ ID NO: 156 - protein, 1341 aa, Peptoniphilus sp.
MWGSRLFEEASTAQDRREHRSNRRRLERRKYRLDLLEELFVEEINKIDPEFFIRLRESKFHFEDRSLKNTFILFNDKMEGGYNDKVFFSKYPTIYHLRSALINGNKEDVRAVFLAIHNILKNRGHFLLAGNDINISLSLNDTLTDLFEYLKIHLGIEVEFENKLKDIEKIALDKNLSKSDKQKKIVQLLETDYKKQLADVFKLSLGLTANMENIFGKENEQGLEFINAENKIKKIQFDSSYEENIAEFDQFYGEYFEIIDICKKIYDAISLSQILVDGKGLSESKVLSYEKHKEDLKLLKKVLKNIDKAYDNKGEDRLVYKVLKEDKDKGTNYVNYSKLSNNGTATTKEEFYKFLSKNLDLKKFGKLNKEDIETLDYINSEILLGRFLPLQKEKINGVIPYQLQMKELTQILNNASKYLPFLNKIEDGMTVKDKIISLIKFRIPYYVGPLNEYNRIENGNGFAWIEKKKNEKIFPWNFNDVVDIEKSAEKFINNLTNKCTYIKEETVLPKNSIIYSKFMVLNELNNLQYGNKKLDIELKMKMYTDLFLEKKDNRKVTEKRILEYFRINGINDGKEKLTGLNNEIHADMKSYRDMCEIMGENFNINVAENIINWITVFHGEKKILINKIKNVYGKMFNDEQISKLSKLNYSDWGRLSKKLLTDIKCYIDADGINFPVSILEAMEVSNKNLMELLSNKYEFISCIDDINNKYFGDRDISASELIDELYVSPAVKRGIWQSVRILEEIVSIIGHNPKKIFIEMTRHNEEKVQKSSRRHNLEELYKAIRKDPEYVELIKEFDSTTDTDSFKIKKLYLYFMQLGKCAYSKEKIDFDKLFTDSYDIDHIYPRSKTKDDSIHNNLVLVKAKYNREKTDVYPIDINIQKNMNSFWNFLYTKKFITEEKYKRLIRTSDLTDEELAKFISRQLVETSQSTKATAEVLKQIYGDSDICYVKAENVSDFRYGSSRQKDKNDIQKLFVKCREVNHFHHAKDAYLNIVVGNVYDVKFTKNPVNFIKKNKMGNKSNYSLNHMFCFDVERNGYKAWDSSETIKTVGRMMKSNDVRITKHVHPTRGELYDATIYKAKIAKTGSYMPLKSSKNTPLSDVTKYGGYTKIKIAYYSVYKYKFSDKNLIKTEIRLIPIPIYLSKNDDDIKEYVKNYLNDRVNSKLIDFTKIYDKLYVNSLIKINGYLYYLGGKTNDRVWIDNAVSIVLDDKIEYLIKRISNDIKYGYEINVSDDELMDIYESLAEKANKKIFYNRLSDFEKIFSNMDVKKKFVKLEKNDKCRVLLQLLNVLTDSQTTYKLEMVGLKHSRSNIGMKISNLEEFKVINSSITGLYSNEIDILNI

SEQ ID NO: 157 - protein, 1391 aa, Lactobacillus gasseri
MTKIKNEYIVGLDVGTNSCGWVAMDFQNTILRMHGKTAIGSHLFDAGNSAADRRAFRTTRRRIKRRKWRLKLLEEIFDPYMTEVDPYFFARLKESGLSPLDKRKNVSSIVFPTALEDKKFYCNYPTIYHLRYDLMSEDKKFDLREIYLAIHHIVKYRGNFLYNTPVKDFEASKIDVKDSLEKLNELYERLDSEFTVELDSSNALEIEKIIRDKKVFKINKVKSIHQLLSLKTENKERTKLIKDVSKQIINAILGYKTKFETILLKNISKDEADDWEFKLTDVDADNKFENLIGDLNENEQEILLEIRNLANAITLSNIVEEGKTLSESMIDKYNKHSDDLELLKQVISDHPDRDKAKKLALAYDLYVNNRHGKLLQAKDVLGSKKTLSKEDFYKEVKKNLDDSKASQEILDTIALDSFMPKQRTNENGVIPYQLHQLELDRIIKNQGKYYPFLKEVNPVSSHLKEAPYKLDELIRFRVPYYVGPLISPNESTKNKQTKKNQNFAWMIRKEQGQITPWNFDQKVDRMASANKFIKRMTTKDTYLLGEDVLPANSLLYQKFTVLNELNNIKINGKRISVPLKEELYNNLFKKNSTVTTNKLKSYLKENYNLINVEIKGLADEKKFNSGLTTYNKLRNLKIFDQQLDDLNYDKDFERIIEWSTIFEDKAIYKDKLKTIKWLSDRQIDKLSKIRMQGWGQLSKKLLSQLTDNNGQTIIEQLWDSQNNFMQIVNQSDFKDAIAVANQNLLVNTSVEDILNEAYTSPANKKAIRQVVKVVDDIVKAASGKVPKQIAIEFTRDADDKAKISQTRANKLRKVYKELSNELASETIRNELERVAKDQKLLKDKYYLYFMQLGRDAYTGEPINIDDLGQYDIDHILPQSFIKDDSLENRVLVKKAVNNGKSDNVPVKLYGNRMAADLGMTIRHMWEKWKDQGLITKTKYNNLIIDPDKINKYESSGFIHRQLVETSQIIKLVSTILQSKYPDTEIIVVKARYNHYLRKHLNLYKSREVNDYHHAIDAYLSAICGNLLYQVYPYLRPFFVYGQYKKFSSDPKKEKIIYDKTRKYNFISQIFENKSNDIISLETKKKVFDKKDIIEKLKHAYNYKYMLVSRETETHDQEMFKMTVYPRLSRDTKKSRNLISKKKDMPTEIYGGYTNNSDAYMVIARINKKKGTEYRVFGVPMRELVNLRKAEKNGRYNAYLKQVLEPEIMYSKNGKKNKTISSFEIVKAKVPYKQVILDGDKKFMLASSTYVQNAKQLTLSQNSMQAITDNCENDTEEEKALEEKALIEAYDEILTNIDKYLPLFDINKFREKLHAGREKFINLSLDVKKDTILQVLNGLHDNAVMPKIKSLGLSTPLGFMQFSSGVPLSENAKLIYQSPTGLFEKRVKISDL

SEQ ID NO: 158 - protein, 1426 aa, Sphingobacterium spiritivorum
MKHILGLDLGTNSIGWALIKQDFENKQGEILGMGSRIIPMSQDILGDFGKGNSVSQTAERTKYRSVRRLRERFLLRRERLHRILNVLGFLPEHYASQIDFTKRFGKFKEETEPKLVYSNEGFIFKKSFEEMLSDFKTHQPQLLEDNKKIPYDWTIYYLRKKALSRKIEKEELAWILLNFNQKRGYYQLRGEEEEENPNKLIEFYSLKIVDVLADEPQKGKSDIWYSLILENGWIYRRSSKTPLFDWKEKTRDFIVTIDLNDDGSVKTDKEGNEKRSFRAPGENDWTLVKKKTEQEIDSSRKTVGTYIYETLLKNPKQKIKGKLVRTIERKFYKTELKQILEKQKEFHPELRQDDLYSDCVRELYKNNEAHQLTLSKKDFVHLFMEDIIFYQRPLGSQKSSISNCTLEFRKYKDENGTEHTQYLKAIPKSNPYYQEFRIWQWMYNLNIYKKEDDTNVTKDFLNTKADFESLFEFLNNRKEVDQKALLKHFKLNDKTHRWNYVEDKKYPCNETKTMILSRLDKVENISDDFLTREMEQKIWHIIYSVNDKVEYEKALKSFAGKNNLEDNSFFEAFKKFPPFKSEYGAFSEKAIKKLLPLMRMGKFWNYNNISEQSKSRIQKIITGEYDENIKDKVREKAIHLTTETDFQGLQLWLVQYIVYGRHSEAAMLGKWNSADDLEEFLKEFKQHSLRNPIVEQVITETLRVVKDIWQKYGNGAKDFFREIHIELGREMKLPAEERERLTRQISENENTNFRIKALLAEMMDDNSVENVRPFSPMQQEILKIYEEGVLNSDIEIEDDILKISKTAQPSSSDLKRYKLWLEQKYKSPYTGQIIPLNKLFTPEYEIEHIIPQSRYFDDSFTNKIICESAVNKLKDNYIGLEFIKKLGGSIVECGNGKSVAILKHDAYEDFIKKHYANNRSKRNKLLLEDIPEKMIERQMNDTRYISKYISGVLSNIVRVEDGTDEGVNSKNIVPGNGKITTQLKQDWGLNDVWNDLILPRFERMNHLTNSTDFTAWNENHQKFLPTVPVEFSKGFSKKRIDHRHHALDALVIACATKDHVNLLNNQSAKSDTKRYDLKKKLMKFEKVAYNHPQTGERIEREAPKQFLKPWETFTIDAKNHLETIIVSFKQNLRVINKATNYYEKYVEKEGTKVKERVEQKGTNWAIRKPMHKETVSGKIDLPRIKVPKGKILTATRKSLDTSFNLKTIGSITDTGIQKILKNYLQYKDNNPELAFSPEGIEDMNKNIEKFNNGKAHQSISKVRVFELGSKFPLGQSGNKKEKYVEAAKGTNLFFAIYQDKNGKRSYETIPLNEVIERQKQGLSVVDLKGVDDFYLSPNDLVYVPSEDELENISMIDFNKMSSERIYKVVSFTGNQIFFVRQDIATSVVNKAEFSTLNKMERAIDGTMIKETCVKLQIDRLGNISKI

SEQ ID NO: 159 - protein, 1361 aa, Lactobacillus casei; identical to SEQ ID NO: 75

SEQ ID NO: 160 - protein, 1436 aa, Bacteroides fragilis
MKRILGLDLGTNSIGWALVNEAENKDERSSIVKLGVRVNPLTVDELTNFEKGKSITTNADRTLKRGMRRNLQRYKLRRETLTEVLKEHKLITEDTILSENGNRTTFETYRLRAKAVTEEISLEEFARVLLMINKKRGYKSSRKAKGVEEGTLIDGMDIARELYNNNLTPGELCLQLLDAGKKFLPDFYRSDLQNELDRIWEKQKEYYPEILTDVLKEELRGKKRDAVWAICAKYFVWKENYTEWNKEKGKTEQQEREHKLEGIYSKRKRDEAKRENLQWRVNGLKEKLSLEQLVIVFQEMNTQINNSSGYLGAISDRSKELYFNKQTVGQYQMEMLDKNPNASLRNMVFYRQDYLDEFNMLWEKQAVYHKELTEELKKEIRDIIIFYQRRLKSQKGLIGFCEFESRQIEVDIDGKKKIKTVGNRVISRSSPLFQEFKIWQILNNIEVTVVGKKRKRRKLKENYSALFEELNDAEQLELNGSRRLCQEEKELLAQELFIRDKMTKSEVLKLLFDNPQELDLNFKTIDGNKTGYALFQAYSKMIEMSGHEPVDFKKPVEKVVEYIKAVFDLLNWNTDILGFNSNEELDNQSYYKLWHLLYSFEGDNTPTGNGRLIQKMTELYGFEKEYATILANVSFQDDYGSLSAKAIHKILPHLKEGNRYDVACVYAGYRHSESSLTREEIANKVLKDRLMLLPKNSLHNPVVEKILNQMVNVINVIIDIYGKPDEIRVELARELKKNAKEREELTKSIAQTTKAHEEYKTLLQTEFGLTNVSRTDILRYKLYKELESCGYKTLYSNTYISREKLFSKEFDIEHIIPQARLFDDSFSNKTLEARSVNIEKGNKTAYDFVKEKFGESGADNSLEHYLNNIEDLFKSGKISKTKYNKLKMAEQDIPDGFIERDLRNTQYIAKKALSMLNEISHRVVATSGSVTDKLREDWQLIDVMKELNWEKYKALGLVEYFEDRDGRQIGRIKDWTKRNDHRHHAMDALTVAFTKDVFIQYFNNKNASLDPNANEHAIKNKYFQNGRAIAPMPLREFRAEAKKHLENTLISIKAKNKVITGNINKTRKKGGVNKNMQQTPRGQLHLETIYGSGKQYLTKEEKVNASFDMRKIGTVSKLAYRDALLKRLYENDNDPKKAFAGKNSLDKQPIWLDKEQMRKVPEKVKIVTLEAIYTIRKEISPDLKVDKVIDVGVRKILIDRLNEYGNDAKKAFSNLDENPIWLNKEKGISIKRVTISGISNAQSLHVKKDKDGKPILDENGRNIPVDFVNTGNNHHVAVYYRPVIDKRGQLVVDEAGNPKYELEEVVVSFFEAVTRANLGQPIIDKDYKTTEGWQFLFSMKQNEYFVFPNEKTGFNPKEIDLLDVENYGLISPNLFRVQKFSLKNYVFRHHLETTIKDTSSILRGITWIDFRSSKGLDTIVKVRVNHIGQIVSVGEY

SEQ ID NO: 161 - protein, 1517 aa, Bacteroides sp.
MKKIVGLDLGTNSIGWALINAYINKEHLYGIEACGSRIIPMDAAILGNFDKGNSISQTADRTSYRGIRRLRERHLLRRERLHRILDLLGFLPKHYSDSLNRYGKFLNDIECKLPWVKDETGSYKFIFQESFKEMLANFTEHHPILIANNKKVPYDWTIYYLRKKALTQKISKEELAWILLNFNQKRGYYQLRGEEEETPNKLVEYYSLKVEKVEDSGERKGKDTWYNVHLENGMIYRRTSNIPLDWEGKTKEFIVTTDLEADGSPKKDKEGNIKRSFRAPKDDDWTLIKKKTEADIDKIKMTVGAYIYDTLLQKPDQKIRGKLVRTIERKYYKNELYQILKTQSEFHEELRDKQLYIACLNELYPNNEPRRNSISTRDFCHLFIEDIIFYQRPLKSKKSLIDNCPYEENRYIDKESGEIKHASIKCIAKSHPLYQEFRLWQFIVNLRIYRKETDVDVTQELLPTEADYVTLFEWLNEKKEIDQKAFFKYPPFGFKKTTSNYRWNYVEDKPYPCNETHAQIIARLGKAHIPKAFLSKEKEETLWHILYSIEDKQEIEKALHSFANKNNLSEEFIEQFKNFPPFKKEYGSYSAKAIKKLLPLMRMGKYWSIENIDNGTRIRINKIIDGEYDENIRERVRQKAINLTDITHFRALPLWLACYLVYDRHSEVKDIVKWKTPKDIDLYLKSFKQHSLRNPIVEQVITETLRTVRDIWQQVGHIDEIHIELGREMKNPADKRARMSQQMIKNENTNLRIKALLTEFLNPEFGIENVRPYSPSQQDLLRIYEEGVLNSILELPEDIGIILGKFNQTDTLKRPTRSEILRYKLWLEQKYRSPYTGEMIPLSKLFTPAYEIEHIIPQSRYFDDSLSNKVICESEINKLKDRSLGYEFIKNHHGEKVELAFDKPVEVLSVEAYEKLVHESYSHNRSKMKKLLMEDIPDQFIERQLNDSRYISKVVKSLLSNIVREENEQEAISKNVIPCTGGITDRLKKDWGINDVWNKIVLPRFIRLNELTESTRFTSINTNNTMIPSMPLELQKGFNKKRIDHRHHAMDAIIIACANRNIVNYLNNVSASKNTKITRRDLQTLLCHKDKTDNNGNYKWVIDKPWETFTQDTLTALQKITVSFKQNLRVINKTTNHYQHYENGKKIVSNQSKGDSWAIRKSMHKETVHGEVNLRMIKTVSFNEALKKPQAIVEMDLKKKILAMLELGYDTKRIKNYFEENKDTWQDINPSKIKVYYFTKETKDRYFAVRKPIDTSFDKKKIKESITDTGIQQIMLRHLETKDNDPTLAFSPDGIDEMNRNILILNKGKKHQPIYKVRVYEKAEKFTVGQKGNKRTKFVEAAKGTNLFFAIYETEEIDKDTKKVIRKRSYSTIPLNVVIERQKQGLSSAPEDENGNLPKYILSPNDLVYVPTQEEINKGEVVMPIDRDRIYKMVDSSGITANFIPASTANLIFALPKATAEIYCNGENCIQNEYGIGSPQSKNQKAITGEMVKEICFPIKVDRLGNIIQVGSCILTN

SEQ ID NO: 162 - protein, 1399 aa, Olsenella uli
MNLRNTTDEYNIGLDMGTNSVGWAVTDKAGAIAHFKGKPTLGSRLFDAAQTAAGARIHRSQRRRYVRRRWRLDLLQSLFQDEVSKVDSEFFCRLRQSRLYVGDREKGHADYTWPIFNDSDFNEVDYYKRFPTIYHLRKWLMETDEKADIRLIYLATHNIVKHRGNFLRENNKSLSSRDANPAQAVKSLRLALNDWCSERDYECAWKGEEDDGAIDEAILNVLADGEKGRSDQAKEIAKLTGVDCGDAKQSKQCNEAIAKAIVGLKVEMKNIFGEFPAEKTSYIYLSSDEDVEAVRESCPDDSGELFQALCKLYSAYILQELLSYADPSGQTISANMVAKYKQYGRDLRLLKELTRTYAPQKYDLFFRGETYAGSSDYVVDEARGYTRYNLGTTKANYDDFQKSVKELFKGTDALQDERYQEMMVAFGEQKFLRRLKTSDNGSIYYQLHLEELHTILENQGKHYPFLLSEEDKIESLVSFRIPYYVGPLTRKNAAIGHDGKERFAWSSRKDGMEHAVITPWNWEEIIDRDKSAEDFIMRMTGDCTYLQGEPVLPKCSLLYEEFCALNEFNGAHWTVDGDDERRFDAAQRERIMCDLFRRTRSVTYNKVSDWLERKYNFTGARVRGGQGEHGFESKLGSYIFFCKDVFKTDGLDEADYTMIEQIILWSTLFEDRDILKRKIEEAYGGDRLTSEQIKVICKKRFTGWGRLSKRLLTDIKVNTDTGRKSIMDVLREGNPNNGQRSRTMVFMEVLRDEDLGFQKAIDGLNRDYFREHNNGLMDVNDLPGSPAIRRSINQAVRIVDEIASIARKEPTNIFIEVTREEDDPRKKGKRTKRRYDAIKSALEKFKKDDPSLWKELCEKAPGDMDERLSLYFMQRGKCMYSGRPIKIEELHTGKYEVDHIIPRSYIKDDSFENKVLVYREENQHKTDALLIDSSIRQKMGGYWRMLHDAKLVGDKKFRNLFRNHIDDKAMKGFVARQIVETSQMVKLVQTLFEARYPNTRIVPVKAGISHDLREAAGLVKCREANDFHHAHDAFLACRIGLFIQKRHPSVYDNPIGLARIMRDYARMQAREYKKSHCLAHTQGFIVNSFLSSGFDEETGEIFKDDWDAKAEVEGIRRVLNCRQCFISRMPVEGDTRYGGRYWGETIYSPKGKHKHEIPLKQGLDPNLYGGYSDLLYSYFLIYEASDVSSGERVLRFIGIPTSIAARMANQKRLEEYVSRLALQENLEHVRMVRKIMKKQLIEVDNCRLLVTAADAVTNATELAFSLDEMKIISTCAKCINGADPSAIDKIGNAQDSFFDNLKRRGSDRCALLFSQLKLDKLSQNFYMISSDDKSKILISILDRIRAKSNSVDLSLVGGAKHAAQMKFDFNAKLNNPASSFVLIDQSVTGMFERRTRIGL

SEQ ID NO: 163 - protein, 1398 aa, Veillonella atypica
METQTSNQLITSHLKDYPKQDYFVGLDIGTNSVGWAVTNTSYELLKFHSHKMWGSRLFEEGESAVTRRGFRSMRRRLERRKLRLKLLEELFADAMAQVDSTFFIRLHESKYHYEDKTTGHSSKHILFIDEDYTDQDYFTEYPTIYHLRKDLMENGTDDIRKLFLAVHHILKYRGNFLYEGATFNSNAFTFEDVLKQALVNITFNCFDTNSAISSISNILMESGKTKSDKAKAIERLVDTYTVFDEVNTPDKPQKEQVKEDKKTLKAFANLVLGLSANLIDLFGSVEDIDDDLKKLQIVGDTYDEKRDELAKVWGDEIHIIDDCKSVYDAIILMSIKEPGLTISQSKVKAFDKHKEDLVILKSLLKLDRNVYNEMFKSDKKGLHNYVHYIKQGRTEETSCSREDFYKYTKKIVEGLADSKDKEYILNEIELQTLLPLQRIKDNGVIPYQLHLEELKVILDKCGPKFPFLHTVSDGFSVTEKLIKMLEFRIPYYVGPLNTHHNIDNGGFSWAVRKQAGRVTPWNFEEKIDREKSAAAFIKNLTNKCTYLFGEDVLPKSSLLYSEFMLLNELNNVRIDGKALAQGVKQHLIDSIFKQDHKKMTKNRIELFLKDNNYITKKHKPEITGLDGEIKNDLTSYRDMVRILGNNFDVSMAEDIITDITIFGESKKMLRQTLRNKFGSQLNDETIKKLSKLRYRDWGRLSKKLLKGIDGCDKAGNGAPKTIIELMRNDSYNLMEILGDKFSFMECIEEENAKLAQGQVVNPHDIIDELALSPAVKRAVWQALRIVDEVAHIKKALPSRIFVEVARTNKSEKKKKDSRQKRLSDLYSAIKKDDVLQSGLQDKEFGALKSGLANYDDAALRSKKLYLYYTQMGRCAYTGNIIDLNQLNTDNYDIDHIYPRSLTKDDSFDNLVLCERTANAKKSDIYPIDNRIQTKQKPFWAFLKHQGLISERKYERLTRIAPLTADDLSGFIARQLVETNQSVKATTTLLRRLYPDIDVVFVKAENVSDFRHNNNFIKVRSLNHHHHAKDAYLNIVVGNVYHEKFTRNFRLFFKKNGANRTYNLAKMFNYDVICTNAQDGKAWDVKTSMNTVKKMMASNDVRVTRRLLEQSGALADATIYKASVAAKAKDGAYIGMKTKYSVFADVTKYGGMTKIKNAYSIIVQYTGKKGEEIKEIVPLPIYLINRNATDIELIDYVKSVIPKAKDISIKYRKLCINQLVKVNGFYYYLGGKTNDKIYIDNAIELVVPHDIATYIKLLDKYDLLRKENKTLKASSITTSIYNINTSTVVSLSNKVGIDVFDYFMSKLRTPLYMKMKGNKVDELSSTGRSKFIKMTLEEQSIYLLEVLNLLTNSKTTFDVKPLGITGSRSTIGVKIHNLDEFKIINESITGLYSNEVTIV

SEQ ID NO: 164 - protein, 795 aa, Prevotella disiens
MEKQRILGLDPGTNSLGWAVLDFDNSKQEYNLVRKGEVIFEEGVGKSKRGEFSKAAYRTFYKSTRKHYFRRRLRKIEVLKVLVKYDFCPYLSDDLLKQWHEKKIYPAVKEFMDWQRTSDAEGKNPYYDRHCCLNEKLDLSLKSDRYVLGRALYHLTQRRGFKSNRLIQNNDENEEGKVKKGISELSTEMQEANCNYLGDYFYKLYTEKGNTVQIRKRYTDREKHYKNEFNAICEKQELNETIVKELDKAIFFQRKLKPQRHGVGKCTFEPNNRRCAISHPDFERFRMLCFINNIKIKTPFEENLRPLNNEEKALIEPLFYRKSIKNFDFEEIAKKLAGKNNYCYIKDDSSKQYKFNYRMSQGASTCQTIAKLKSIFGEEWKNGIAETYTNRRKKEGLKKQAEMVDDIWNVLYSVSECDVLKDFAINKLQLDEKTADNFSKTKLAQGFATLSLKAIRKILPFLEQGFGYTEAVFLANIPTVVGKEYWNNEDIRNDIMEEIKTIFYHNTLKTNDSHNTILFCIKDILSNNFDLAPGAIDKLYHPSMINVYKDVIPNEDGILQLGSPKIDAVKNPMAMRSLHIIRKVVNELLREGIINSDTEVRIEYARELNDANKRHAIADWQKKQYGKHQKYRKEIKELFKAETGFEIEPNETDILKFELWEEQNHICLYTGQEIGISEFVGENPKYDIEHTIPRSLGGDSTKMNMTLCENKFNRENKQKKLPSELANHSEILERIDDWKKKIYILQKKYDSIRTHNGMDKENKDKKIVSMQVRISGSSICVYSQNTLLWLQYGYN

SEQ ID NO: 165 - protein, 1428 aa, Burkholderiales bacterium
MGKTHIIGVGLDLGGTYTGTFITSHPSDEAEHRDHSSAFTVVNSEKLSFSSKSRTAVRHRVRSYKGFDLRRRLLLLVAEYQLLQKKQTLAPEERENLRIALSGYLKRKGYARTEAETDTSVLESLDPSVFSSAPSFTNFFNDSEPLNIQWEAIANSPETTKALNKELSGQKEADFKKYIKTSFPEYSAKEILANYVEGRRAILDASKYIANLQSLGHKHRSKYLSDILQDMKRDSRITRLSEAFGSTDNLWRIIGNISNLQERAVRWYFNDAKFEQGQEQLDAVKLKNVLVRALKYLRSDDKEWSASQKQIIQSLEQSGDVLDVLAGLDPDRTIPPYEDQNNRRPPEDQTLYLNPKALSSEYGEKWKSWANKFAGAYPLLTEDLTEILKNTDRKSRIKIRSDVLPDSDYRLAYILQRAFDRSIALDECSIRRTAEDFENGVVIKNEKLEDVLSGHQLEEFLEFANRYYQETAKAKNGLWFPENALLERADLHPPMKNKILNVIVGQALGVSPAEGTDFIEEIWNSKVKGRSTVHSICNAIENERKTYGPYFSEDYKFVKTALKEGKTEKELSKKFAAVIKVLKMVSEVVPFIGKELRLSDEAQSKFDNPYSLAQLYNLIETERNGFSKVSLAAHLENAWRMTMTDGSAQCCRLPADCVRPFDGFIRKAIDRNSWEVAKRIAEEVKKSVDFTNGTVKIPVAIEANSFNFTASLTDLKYIQLKEQKLKKKLEDIQRNEENQEKRWLSKEERIRADSHGICAYTGRPLDDVGEIDHIIPRSLTLKKSESIYNSEVNLIFVSAQGNQEKKNNIYLLSNLAKNYLAAVFGASDLSQITNEIESTVLQLKAAGRLGYFDLLSEKERACARHALFLNSDSEARRAVIDVLGSRRKASVNGTQAWFVRSIFSKVRQALAAWTQETGNELIFDAISVPAADSSEMRKRFAEYRPEFRKPKVQPVASHSIDAMCIYLAACSDPFKTKRMGSQLAIYEPINFDNLFTGSCQVIQNTPRNFSDKTNIANSPIFKETIYAERFLDIIVSRGEIFIGYPSNMPFEEKPNRISIGGKDPFSILSVLGAYLDKAPSSEKEKLTIYRVVKNKAFELFSKVAGSKFTAEEDKAAKILEALHFVTVKQDVAATVSDLIKSKKELSKDSIENLAKQKGCLKKVEYSSKEFKFKGSLIIPAAVEWGKVLWNVFKENTAEELKDENALRKALEAAWPSSFGTRNLHSKAKRVFSLPVVATQSGAVRIRRKTAFGDFVYQSQDTNNLYSSFPVKNGKLDWSSPIIHPALQNRNLTAYGYRFVDHDRSISMSEFREVYNKDDLMRIELAQGTSSRRYLRVEMPGEKFLAWFGENSISLGSSFKFSVSEVFDNKIYTENAEFTKFLPKPREDNKHNGTIFFELVGPRVIFNYIVGGAASSLKEIFSEAGKERS

SEQ ID NO: 166 - protein, 1025 aa, gamma proteobacterium
MGGYMPQLMRYRLALDIGSTSIGWAMIRLSMQNEPIAIIRMGVRIFSDGRNPKDGSSLAVTRRVARQMRRRRDRLLKRKTRLLNALVQKKFFPEDADARKALVVLNPYELRKEGLYRQLSGPEFGRALFHISQRRGFLSNRKTDKKDNDSSVLKKAIVDLRQQLEVENCQTIGEWLFKQQQSGKSVRARLRGKTQKDKAYDFYIDRAMIAHEFDTLWVSQAKYDPLLFNEDARAILRDILLYQRPLKPVKPGRCTLIPDESRAPLALPLTQQARIYQELNHLRITTPALGAQALTVAQRNTIAALLEKSDVTFVKIAKALGLTSTTEFNLQDIKRDRLKGNATAIILARNQYFGRRWHDFNADLQNLIVDKLVNEGSETALIEWLKANTDVDESAAERVSGVTLPEGYGSLSVAALRRLLPALKEDVVVYSEAVKRAGFDSHSALSLIEQTGELYQELPYYGEVLQRHVGFGSGDPNDSPERRFGKIANPTVHIGLNELRKIINALIKRYGNPAEVVVELARDLKLSREKRKEIQEEQKQRQDRNEKRIKDACEILGIDPLVIDRGKRREISQKMQLWDELNPKDAANRRCPYTGDQISIEKLLSAEVEIEHILPFSKTLDDSLNNKTVAMRRANRDKGNRTPYEAFGESLNPDYDYDAILQRASLMPREKRKRFASDGYQQWLRDDKDFLSRALNDTAYLSRIAKEYLTLICPPNSVRAIPGRMTAQLRAMFGLNRLLSEGGIKNREDHRHHAIDAAVIGVTDQGLLQKFSRASARTRELQLSRLVDDMPLPWDTYREHVTRALEHLVVSHKPDHGYQGKMHEDTAWGLRDNGQVTRRVRSEDGGPRQRLLENKNVVKINSTRDFSRHGIDEQGQVNAYKGYVGGSNYCIEIWIDEKGKWNSDVVSTFQAYQIVRELGEKAAWQKLRNPLLSLSAKPLVMRLIIDDVVKMQIAGQNKIMRVVKIAQNGQIFFAEHNEANVDARDKDKNNPFKYISKTAGSLQKAGGIHMAISPIGDARPVRYGR

SEQ ID NO: 167 - protein, 1364 aa, Pediococcus acidilactici
MGDRKYNLGLDIGTSSIGFAAVDENNQPIRVKGKTAIGVRLFEEGKTAADRRGFRTTRRRLSRRRWRINLLNEIFDAHLAEVDPTFLARLKESNRSNLDPKKSFQGSLLFPERKDYQFYEEYPTIYHLRKALMEKDRKFDFREIYLAVHHIIKYRGNFLNGTPMRSFKVENIELDTLFDQLNQLYAEIVPDNELAFDLAQVADVKDVLSSTTIYKMDKKKQLVKMMLLPASNKALQSENKKIVTQFVNAILNYKFKLDVLLQVETDADWSLKLNDEGADDKLEEFTGDLDENRLEIIDLLQRLHNWFSLNEITKDGNSLSAAMVEKYENHHHHLGLLKKVIENHPDAKKAKALKETYTAYVGKTDDKTQNQDDFYKAVEKNLDDSPDAKEIKRLIQLDQFMPKQRTGQNGAIPHQLHQQELDQIIEKQSKYYPFLAEPNPNVKRRKDAPYKLDELIAFKIPYYVGPLVTPEEQAQNGENVFAWMKRKAAGPITPWNFDEKVDRMESANRFIRRMTTKDTYLFGEDVLPAESMIYQKFVVLNELNNLKINGRHLSLKDKQDVYNDLFKQQKTVSIKALQNYYVTKKKAATAPTVGGLADPKKFLSSLSTYIDFKNMFGERVNDPQFQEDLEQIVEWSTIFEDRGIFKAKLQALGWLSEKQIQQLVAKRYKGWGRLSKKLLTGLKNAEGYSILDEMWRSTGNFMQIQSRPEFAALIQQANEKQFEGNDPDNVWENIENILGDAYTSPQNKKAIRQVVKVVQDIEKAVGNPPEKIAIEFTREAAANPQRTQSRLRTLEKLYESAEEVVDAGLTAELAEFKENKHVLSDKYYLYFTQLGRDVYTGDTISLDKLNDYDVDHILPQSFIKDDSLDNRVLTIRAVNNGKSDNVPAKMFGKKMGSFWRYLLDNGMISKRKYNNLITDPDNISKYAQKGFINRQLVETSQVIKLTANILNGIYDKDTEIIEVPAKMNSQMRKMFDLVKVREVNDYHHAFDAYLTIFIGNYLYKCYPKLQPYFVYDNFKKFGNKEDIGHKRFNFLGKIEREKKVVAPETGEILWSNVAPNETIKQIKKVYDYKFMIVSREITTRRAELFNQTVYPKNYHGKLIPIKEDRPTDLYGGYSGNTDAYLAIVALEDKKKGKYFKVVGIPTRVAAKLEKLKQQDSQQYLQALHKVIAPQFTKSTKKGIKKTEFEIVLDKVHYRQLVQDGPVKMMLGSSTYKYNAKQLVLSEKALQVIADDRKFDETQKDDNLIAVYDEILSIVNQSFDLYDINGFRKKLNDNRDQFIDLPAETKYEGRKVVAHGKREMILEILKGLHANAAFGNLKPIGFSTAFGQLQVPNGIILSKNAILIHQSPSGLFERKIKLSDL

SEQ ID NO: 168 - protein, 1364 aa, Peptoniphilus duerdenii
MKNLKEYYIGLDIGTASVGWAVTDESYNIPKFNGKKMWGVRLFDDAKTAEERRTQRGSRRRLNRRKERINLLQDLFATEISKVDPNFFLRLDNSDLYREDKDEKLKSKYTLFNDKDFKDRDYHKKYPTIHHLIMDLIEDEGKKDIRLLYLACHYLLKNRGHFIFEGQKFDTKNSFDKSINDLKIHLRDEYNIDLEFNNEDLIEIITDTTLNKTNKKKELKNIVGDTKFLKAISAIMIGSSQKLVDLFEDGEFEETTVKSVDFSTTAFDDKYSEYEEALGDTISLLNILKSIYDSSILENLLKDADKSKDGNKYISKAFVKKFNKHGKDLKTLKRIIKKYLPSEYANIFRNKSINDNYVAYTKSNITSNKRTKASKFTKQEDFYKFIKKHLDTIKETKLNSSENEDLKLIDEMLTDIEFKTFIPKLKSSDNGVIPYQLKLMELKKILDNQSKYYDFLNESDEYGTVKDKVESIMEFRIPYYVGPLNPDSKYAWIKRENTKITPWNFKDIVDLDSSREEFIDRLIGRCTYLKEEKVLPKASLIYNEFMVLNELNNLKLNEFLITEEMKKAIFEELFKTKKKVTLKAVSNLLKKEFNLTGDILLSGTDGDFKQGLNSYIDFKNIIGDKVDRDDYRIKIEEIIKLIVLYEDDKTYLKKKIKSAYKNDFTDDEIKKIAALNYKDWGRLSKRFLTGIEGVDKTTGEKGSIIYFMREYNLNLMELMSGHYTFTEEVEKLNPVENRELCYEMVDELYLSPSVKRMLWQSLRVVDEIKRIIGKDPKKIFIEMARAKEAKNSRKESRKNKLLEFYKFGKKAFINEIGEERYNYLLNEINSEEESKFRWDNLYLYYTQLGRCMYSLEPIDLADLKSNNIYDQDHIYPKSKIYDDSLENRVLVKKNLNHEKGNQYPIPEKVLNKNAYGFWKILFDKGLIGQKKYTRLTRRTPFEERELAEFIERQIVETRQATKETANLLKNICQDSEIVYSKAENASRFRQEFDIIKCRTVNDLHHMHDAYLNIVVGNVYNTKFTKNPLNFIKDKDNVRSYNLENMFKYDVVRGSYTAWIADDSEGNVKAATIKKVKRELEGKNYRFTRMSYIGTGGLYDQNLMRKGKGQIPQKENTNKSNIEKYGGYNKASSAYFALIESDGKAGRERTLETIPIMVYNQEKYGNTEAVDKYLKDNLELQDPKILKDKIKINSLIKLDGFLYNIKGKTGDSLSIAGSVQLIVNKEEQKLIKKMDKFLVKKKDNKDIKVTSFDNIKEEELIKLYKTLSDKLNNGIYSNKRNNQAKNISEALDKFKEISIEEKIDVLNQIILLFQSYNNGCNLKSIGLSAKTGVVFIPKKLNYKECKLINQSITGLFENEVDLLNL

SEQ ID NO: 169 - protein, 1089 aa, Corynebacterium matruchotii
MNSANVNYRVGIDVGSYSLGMAAIAIDDDGKPTEILSAISLIHDSGVDPDSAKSAATRLATSGIARRTRRLYRRKRKRLAKLDKFISSQGWPLKEFEKYEDPFYPWRVRAELATTAITDQQELGEKLSIALRHIARHRGWRNPYSKVTALYTVTEPSDAFLAMQEECAKQLGRTIPETITVGQLVTGMNLGKTRLRGENSLLAARPRQSDNANEIHTIAKVQGLSNELVRQIIDHVFAAESPKGSAAEQVGKDPLQPTKKRALKASDAFQQYRIAALIGNLRIRGGKGNRRLTTEETRLVFDYLRSLPAKQEPTWQLVAEQLKIDRGNLVGTAIMTDDGERAGAKPPVHDTNRIMENTKIKPLATWWKSADADARAAMVKALSNAEVDDFDSQAGAQVQEFFFGISDEDQEKLDGLHLPIGRAAYSEDTLDRLTKRMIGEGMDLYEARQAEFKISNDWAPPAPEIGERVGNPAVDRVLKATARWLNAAERQWGAPKSVNIEHVRAAFMSESSARELDRDNQQRAKRNVKVVAEMQEKLGIEGRPSRADVWRFQSIQRQNGKCAYCGAEISFKNSEMDHIIPQAGEGSTNTRDNLVAVCRECNSSKSNIAFAVWAENTSRPGVSVQKAIERTHHWVTDSGLRKPEFDKFRKQVCDRLRRKATDEPIDARSLESVAWMANELRSRIAQKFKDGDTKVRVYKGALTAEARRASGISGKLEFVDGKGKSRLDRRHHAVDAAVVAFTSNYVAETLALRSNMKFDQELRRKAPQWREFTGSDHVHQVEWTKWKYRMQALAELLNNALVQDRIVVMHNLRLRLGNGAAHEDTIGKLTRLKVGDAISTTDIDRASSEALWCALTRDPDYDPKTGLPENPNRTIRIHGTHLTASDEITVFPVAAASIPIRDGFAKLGSNYHHVRLFRVPSGKKYKYCLMQVYTVDLLKFRKEDLFTVELKPQTISVRTCEALLRKALANGTAEYLGWLVSDDELLIDTSSFDTPGIVKLREEYGPVNRWRLAGLTSVTRLNLRPLYLSKEGLKPNVNPEIKKIIDNRSWIITVNKLFSSGHVKIIRRDALGRPRLHSAAHLPICWEVK

SEQ ID NO: 170 - protein, 1134 aa, Streptococcus mitis
MNGLVLGLDIGIASEGVGILEKNSGKIIHANSRLFPAATADNNVERRKNRQARRLNRRKKHRGVRFQDLFEDYGLLTDFSKVSINLNPYRLRVDGLNQQLTNEELFIALKNIVKRRGISYLDDASEDGGAVSSDYGKAVEENRKLLAEQTPGQIQLERFEKYGQVRGDFTVVENGEKLRLINVFSTSAYKKEAERILRKQQEFNNQITDEFIEDYLKILTGKRKYYHGPGNEKSRTDYGRFRTDGTTLDNIFGILIGKCTFYPEEYRASKASYTAQEFNLLNDLNNLTVPTETKKLSEEQKKVIVEYAKEAKTLGASTLLKYIAKMIDASVDQIRGYRVDVNNKPEMHTFEVYRKMQSLETISVGELSRNVLDELAHILTLNTEREGMEEAINTKLKDSFSQDQVLELVQFRKNNSSLFSKGWHNFSLKLMMELIPELYETSEEQMTILTRLGKQKSKETSKRTKYIDEKELTEEIYNPVVAKSVRQAIKIINEATKKHGIFDNIVIEMARENNEEDAKKDYIKRQKANQDEKNAAMEKAAFQYNGKKELPDNIFHGHKELATKIRLWHQQGEKCLYTGKTIPISDLIYNQYKYEIDHILPLSLSFDDSLSNKVLALATANQEKGQRTPFQALDSMDDAWSYREFKSYVKDLKSLSNKKKDYLLTEEDISKIEVKQKFIERNLVDTRYSSRVVLNALQDFYKSHQFDTTISVVRGQFTSQLRRKWGLEKSRETYHHHAVDALIIAASSQLRLWKKQNNPLITYKEGQFVDSQTGEIISLTDDEYKELVFKAPYDHFVDTLSSKTFEDSILFSYQVDSKFNRKISDATIYATRKAKLDKEKKEYTYTLGKIKDIYSLGTKTPSKTGFYKFLDLYNKDKSQFLMFQKDRKTWDEVIEKIMEQYRPFKEYDKTGKLVDFNPFEKYRQENEPIRKYSKKGNGPEIKSLKYYDILLGKHKNITPEGSRNTVALLSLNPWRTDVYYNMETKKYEFLGLKYADLPFEEGGAYGISTETYNELREKEGIGKNSEFKFTLYKNDLILIKDTETNCQQIFRFWSRTGKDNPKSFEKHKIELKPYEKARFEKGEELEVLGKVPPSSNQLQKNMQIENLSIYKVKTDVLGNKHFIKKEGDKPKLKF

SEQ ID NO: 171 - protein, 1373 aa, Streptococcus bovis
MTKKNYSIGLDIGTNSVGWAVITDDYKVPAKKMKVLGNTDKKYIKKNLLGALLFDSGETAEATRLKRTARRRYTRRKNRLRYLQEIFAEEMTKVDESFFQRLDESFLRWDDDNKKLGRYPIFGNKADVVKYHQEFPTIYHLRKHLADSSEKADLRLVYLALAHMIKFRGHFLIEGELNAENTDVQKIFADFVGVYDRTFDDSHLSEITVDAASILTEKISKSRRLENLIKYYPTEKKNTLFGNLIALALGLQPNFKMNFKLSEDAKLQFSKDSYEEDLGELLGKIGDDYADLFTSAKNLYDAILLSGILIVDDNSTKAPLSASMIKRYVEHQEDLEKLKEFIKANKSELYHDIFKDKNKNGYAGYIENGVKQDEFYKYLKNTLSKIAGSDYFLDKIEREDFLRKQRTFDNGSIPHQIHLQEMHAILRRQGDYYPFLKENQDRIEKILTFRIPYYVGPLARKDSRFSWAEYHSDEKITPWNFDKVIDKEKSAEKFITRMTLNDLYLPEEKVLPKHSHVYETYAVYNELTKIKYVNEQGKDSFFDSNMKQEIFDHVFKENRKVTKEKLLNYLNKEFPEYRIKDLIGLDKENKSFNASLGTYHDLKKILDKAFLDDKVNEEVIEDIIKTLTLFEDKDMIHERLQKYSDIFTADQLKKLERRHYTGWGRLSYKLINGIRNKENNKTILDYLIDDGSANRNFMQLINDDTLPFKQIIQKSQVVGDVDDIEAVVHDLPGSPAIKKGILQSVKIVDELVKVMGDNPDNIVIEMARENQTTNRGRSQSQQRLKKLQNSLKELGSNILNEEKPSYIEDKVENSHLQNDQLFLYYIQNGKDMYTGDELDIDHLSDYDIDHIIPQAFIKDDSIDNRVLTSSAKNRGKSDDVPSLDIVRARKAEWVRLYKSGLISKRKFDNLTKAERGGLTEADKAGFIKRQLVETRQITKHVAQILDARFNTESDENDKVIRDVKVITLKSNLVSQFRKDFEFYKVREINDYHHAHDAYLNAVVGTALLKKYPKLASEFVYGEYKKYDIRKFITNSSDKATAKYFFYSNLMNFFKRVIRYSNGKVIVRPVVEYSKDTEDIAWDKKSNFRTICKVLSYPQVNIVKKVETQTGGFSKESILPKGDSDKLIPRKTKKAYWDTKKYGGFDSPTVAYSVFVVADVEKGKAKKLKTVKELVGISIMERSFFEENPVEFLENKGYHNIREDKLIKLPKYSLFEFEGGKRRLLASASELQKGNEMVIPGHLVKLLYHAQRINSFNSTKYLDYVSAHKKEFEKVLSCVEDFANLYVDVEKNLSKIRAVADSMDNFSIEEISNSFINLLTLTALGAPADFNFLGEKIPRKRYTSTKECLNATLIHQSITGLYETRIDLSKIGEE

SEQ ID NO: 172 - protein, 1099 aa, Corynebacterium accolens
MSLLYRVGIDVGTYSLGCTAIEVDDNDQPVSILSSVSLIHDSGLDPDQQKRAVTRLASSGVARRTRRLYRRRRRRMVKLENFLTAQGWETLPFERYSDPYLPWHARVALVNGYISDDTQRGQYLSIAFRHIANHRGWRNPYWKVSSLYSPDKPSDAFEQIRKELEASTGRQIPETATVGQLISFAQFGKDRLRGGGKQKDKKKPQEQVNQAVISARLHQIDHAREINEICRVQKIDDTLRKQILDLVFAAESPKGAQKGRVGKDPLQPKLFRALKASDAFQQYRIAALTGNLRIYRNGVTVPLDRDEKLIVFNYLVNLPKKEEPSWLKIAEILNIDRGQLRGTATMTDDGERAGATPPVHDTNRTILDSKVKPLAHWWENASDDERAAMLKSLSNSEVEDFDSPAGAQVQAFFADLDETEQEKLDSLHLPMGRAAYSEDTLMRLTNRMLDENLDLYEARLAEFGIPKDWAPPAPRIGEPVGNPAVDRVLKGVARWLEAAADEWGAPKSVVIEHVRDGFVSKSKAIEIDRANNNRHKRNRELFQKMQENLGIEGKVRSSDLWRYQSVQRQNCQCAYCGSPITYTTCEMDHIVPRAGEGSTNTRDNLVATCHRCNLAKKNIPFAVWAEKSTIPGVSVKEALDRTRHWSEDSGMSKKDFQKFRKNVCERLNRTVVDEPLDARSMESVAWMANELRGRVAQRFQEENTTVNVYRGALTAEARRAAGITDKLRFIDGTGKSRLDRRHHAVDAAVVAFIHNYVAETLAIRSNKKREAQLLQGTSQWKEFTGSDDKHRAVWNAWIPKMQKLAVLLQIALDEDRIVVTSNLRLRLGNGRAHEDTISELKTIRVGDAISVTDIDRASSEALWCALTREPDFDEKDGLPENPNRRIRVHGTWYDAEDEIEVFPVGAGAIKVRGGYAKLSRFHHARVYKIPGKKAPIYCMLRVYNTDLVQHRHEDLFSVELKPQTMSVRQAEPKLRKALAENTAEYLGWLVTDDELIIDTSTFRTGLIEEMQSEFGLVRRWRLDGFDSPSLLTLRPLHMSAEGLPDDCALGSRKIIDTKGWRVSINKVFNAGNTTVVRRDALGRARLTSNAHLPISWKEE

SEQ ID NO: 173 - protein, 1054 aa, Actinobacillus pleuropneumoniae
MKLTPLNYILGLDLGIASVGWAVVEIDEQENPLGLIDVGVRTFDRAEVAKTGESLALARRLARSSRRLVKRRADRIKKVKRLLKSENILLSADEQLPNDVWQLRVKGLDQKLERQEWAAVLLHLLKHRGYLSQRKNESKSENKELGALRSGVAANHQILQSAEYRTPAEIAVKKFHVEEGHIRNQRGAYTHTFSRLDLLAEIELLFTRQTELGNPHTSAKLLENLTALLMWQKPALAGEAILKMLGKCTFEPTEYKAAKNSYSAERFVWLTKLNNLRILEQGAERALTDNERFALLDQPYEKAKFTYAQARTMLALPDEAIFKGVRYQGEDKKAVETKTILMEMKAYHQIRKALENADLKAEWNELKNNSELLDDIGTAFSLHKTDEDICRYLDGKLSESILNALLENLNFDKFIQLSLKALQQILPLMLQGQRYDEAVSAIYGDHYGKKSAEINRLLPTIPADEIRNPVVLRTLTQARKVINAVVRLYGSPARIHIETGREVGKSYQDRKKLEKQQEDNRKHRESAVQKFKEYFPNFVGEPKGKDILKMRLYELQQAKCLYSGKSLELHRLLEKGYVEVDHALPFSRTWDDSFNNKVLVLANENQNKGNLTPYEWLDGKNNSEPWQNFVARVQTSGFSHTKKQRILSHKLDEKGFIERNLNDTRYVVRFLCNFIADNMLLTGKGKRKVFASNGQITALLRGRWGLQKVRDDNDRHHALDAVVVACSTVAMQQKITRFVRYEEGNVFSGERIDRETGEIIPLHFPSPWAFFRENVEIRIFSENPKLELENRLPDYPQYNHEFVQPLFVSRMPTRKMTGQGHMETVKSAKRLDEGLSVLKVPLTQLKLNDLERMVNREREMALYESLKVRLEQFDNDPAKAFAEPFYKKGGALVKAVRVEQTQKSGVLVRDGNGVADNASMVRVDVFTKAGKYFLVPIYTWQVAKGILPNKAVTANVDEIDWLEMDESYQFIFTMYPNDLVKVKLKKEEFFGYYGGLDRATGAIVIKEHDLEKSKGRQGIYRIGVKLALSFEKYQVDELGKNIRPCRPTKRQHVR

SEQ ID NO: 174 - protein, 1369 aa, Lactobacillus iners
MNNNYYLGLDLGTNSVGWAVTDDHYNIIKFHGKHMWGMRLFEEAETAKDRRLHRQARRRRQRLVERINLLEELFDKEISKVDQGFFARKKESDLHFEDKTTKSEYALFNDKSYTDRDYYKQYPTIFHLIMDLIENDKKRDIRLVYLACHYLIKHRGHFIFDGKNFTVDNSFENLLDKLITYLKDNDDITLSFPKDQLINIFKNSNLNSTEKSDQLKPFFGRTNLEKGIIKLLSGGKQDLSNMFRDETLKNSNYKNLKFSDNRFDDERDGYAADLGDRIDLLILLKQIYDASILESMMSQARVSIDGHKYISSAKVCAYEKHKSDLKRLKSLIKKYLPSEYNNIFRKITEKDNYVAYSKSNITNNKREKALKYVKYVDFTKYLTKKLKTIKTQDAEDDQEIFEIKGELEKQSFLPKQRTLDNSIIPYQLHLMELKKILDNQSKYYDFLLAKDDQEGITVKDKIISLLTFRLPYYIGPVNPAVHGKFAWVKRLANGKVTPWNYKEKIDIDASHEEFIKTKLSKCSFLIGCDVLPKNSLLYQKYMVLSELNTIKFNGVNISEKLKDDIYQNLFKNIQKVTKKRLQNYIKEHENIIGDVIVTGIDNAFKQGLVSYLKFKKIIGDKVDDDRYQKVLEKIIRDITLYDECAGKKIKKEYKDSDLFTEDELNKIVKLTFNDWGRLSAELLDQLEGEDTVSGETGKIIEFMQKHNYNLMQLMSKKFTFKSKIDEINKSYYQHDKFNYKSMIDSLYVSPATKRILWQSLKVVHEISKIMKHDPEKIFIEMARSKEDHPKRKLSRKADLKQVYKDSKKQIISIIGKDKYQDLSNELDNKDDRDLRWDNLYLYYTQLGRSMYSLKPIDISELMNKNLYDQDHIFPKSKKYDDSIENRVLVEKELNVKKSDIYPISDANIIPQKIKGQVESFWKMLYDHKLIGDKKYARLIRSKAFTDDELAGFIARQLVETRQATKETADLLKRLCPKSRIVYAKAQNASIFRQKFDIPKSRTINDLHHAQDAYLNIVVGNIFDTKFTQDPRNFIKNTKDSRNYNLEKIYDYNVERNNYVAWIAPDGETNGTIANVKCNLSTKDFRVTRPSFYKKGALFNQNLSRKGSNLAPIKEHSPKSNPLKYGGYSGKNNSFFVVVAGKDNKGKDIVKLIPVNTLIYNKMLHCDYKAKQELLTSYVANNFAINNFRIVKDDIKMYSLVKIDGAYYYLVGGTDERIEVKNAMQLLLSKDSIKAVKILEKESKDQFANIKNYKDIDIKLGRTFNEVVSKYTNSVFGKSMLISDKYRKDIFKSVEKSILEFNHLDTIGKADNLLKFVTLMRPSGSAHSLKMVGLIERIRKSNVISNFNEFKLINQSVTGLFENEEDLLKL

SEQ ID NO: 175 - protein, 1420 aa, Bifidobacterium bifidum
MSRKNYVDDYAISLDIGNASVGWSAFTPNYRLVRAKGHELIGVRLFDPADTAESRRMARTTRRRYSRRRWRLRLLDALFDQALSEIDPSFLARRKYSWVHPDDENNADCWYGSVLFDSNEQDKRFYEKYPTIYHLRKALMEDDSQHDIREIYLAIHHMVKYRGNFLVEGTLESSNAFKEDELLKLLGRITRYEMSEGEQNSDIEQDDENKLVAPANGQLADALCATRGSRSMRVDNALEALSAVNDLSREQRAIVKAIFAGLEGNKLDLAKIFVSKEFSSENKKILGIYFNKSDYEEKCVQIVDSGLLDDEEREFLDRMQGQYNAIALKQLLGRSTSVSDSKCASYDAHRANWNLIKLQLRTKENEKDINENYGILVGWKIDSGQRKSVRGESAYENMRKKANVFFKKMIETSDLSETDKNRLIHDIEEDKLFPIQRDSDNGVIPHQLHQNELKQIIKKQGKYYPFLLDAFEKDGKQINKIEGLLTFRVPYFVGPLVVPEDLQKSDNSENHWMVRKKKGEITPWNFDEMVDKDASGRKFIERLVGTDSYLLGEPTLPKNSLLYQEYEVLNELNNVRLSVRTGNHWNDKRRMRLGREEKTLLCQRLFMKGQTVTKRTAENLLRKEYGRTYELSGLSDESKFTSSLSTYGKMCRIFGEKYVNEHRDLMEKIVELQTVFEDKETLLHQLRQLEGISEADCALLVNTHYTGWGRLSRKLLTTKAGECKISDDFAPRKHSIIEIMRAEDRNLMEIITDKQLGFSDWIEQENLGAENGSSLMEVVDDLRVSPKVKRGIIQSIRLIDDISKAVGKRPSRIFLELADDIQPSGRTISRKSRLQDLYRNANLGKEFKGIADELNACSDKDLQDDRLFLYYTQLGKDMYTGEELDLDRLSSAYDIDHIIPQAVTQNDSIDNRVLVARAENARKTDSFTYMPQIADRMRNFWQILLDNGLISRVKFERLTRQNEFSEREKERFVQRSLVETRQIMKNVATLMRQRYGNSAAVIGLNAELTKEMHRYLGFSHKNRDINDYHHAQDALCVGIAGQFAANRGFFADGEVSDGAQNSYNQYLRDYLRGYREKLSAEDRKQGRAFGFIVGSMRSQDEQKRVNPRTGEVVWSEEDKDYLRKVMNYRKMLVTQKVGDDFGALYDETRYAATDPKGIKGIPFDGAKQDTSLYGGFSSAKPAYAVLIESKGKTRLVNVTMQEYSLLGDRPSDDELRKVLAKKKSEYAKANILLRHVPKMQLIRYGGGLMVIKSAGELNNAQQLWLPYEEYCYFDDLSQGKGSLEKDDLKKLLDSILGSVQCLYPWHRFTEEELADLHVAFDKLPEDEKKNVITGIVSALHADAKTANLSIVGMTGSWRRMNNKSGYTFSDEDEFIFQSPSGLFEKRVTVGELKRKAKKEVNSKYRTNEKRLPTLSGASQP

SEQ ID NO: 176 - protein, 1092 aa, Ilyobacter polytropus
MKYSIGLDIGIASVGWSVINKDKERIEDMGVRIFQKAENPKDGSSLASSRREKRGSRRRNRRKKHRLDRIKNILCESGLVKKNEIEKIYKNAYLKSPWELRAKSLEAKISNKEIAQILLHIAKRRGFKSFRKTDRNADDTGKLLSGIQENKKIMEEKGYLTIGDMVAKDPKFNTHVRNKAGSYLFSFSRKLLEDEVRKIQAKQKELGNTHFTDDVLEKYIEVFNSQRNFDEGPSKPSPYYSEIGQIAKMIGNCTFESSEKRTAKNTWSGERFVFLQKLNNFRIVGLSGKRPLTEEERDIVEKEVYLKKEVRYEKLRKILYLKEEERFGDLNYSKDEKQDKKTEKTKFISLIGNYTIKKLNLSEKLKSEIEEDKSKLDKIIEILTFNKSDKTIESNLKKLELSREDIEILLSEEFSGTLNLSLKAIKKILPYLEKGLSYNEACEKADYDYKNNGIKFKRGELLPVVDKDLIANPVVLRAISQTRKVVNAIIRKYGTPHTIHVEVARDLAKSYDDRQTIIKENKKRELENEKTKKFISEEFGIKNVKGKLLLKYRLYQEQEGRCAYSRKELSLSEVILDESMTDIDHIIPYSRSMDDSYSNKVLVLSGENRKKSNLLPKEYFDRQGRDWDTFVLNVKAMKIHPRKKSNLLKEKFTREDNKDWKSRALNDTRYISRFVANYLENALEYRDDSPKKRVFMIPGQLTAQLRARWRLNKVRENGDLHHALDAAVVAVTDQKAINNISNISRYKELKNCKDVIPSIEYHADEETGEVYFEEVKDTRFPMPWSGFDLELQKRLESENPREEFYNLLSDKRYLGWFNYEEGFIEKLRPVFVSRMPNRGVKGQAHQETIRSSKKISNQIAVSKKPLNSIKLKDLEKMQGRDTDRKLYEALKNRLEEYDDKPEKAFAEPFYKPTNSGKRGPLVRGIKVEEKQNVGVYVNGGQASNGSMVRIDVFRKNGKFYTVPIYVHQTLLKELPNRAINGKPYKDWDLIDGSFEFLYSFYPNDLIEIEFGKSKSIKNDNKLTKTEIPEVNLSEVLGYYRGMDTSTGAATIDTQDGKIQMRIGIKTVKNIKKYQVDVLGNVYKVKREKRQTF

SEQ ID NO: 177 - protein, 994 aa, Streptococcus downei
MENQRGKRQRITHQEPYSIGLDIGTASVGSAVINNDLTVPQKRFKVRDINGNVIKTIKKNMSSVLIFDEANPAKGARTKRTSRRRYTRRNFRLLELKKLFEKEIEKIDPNFFHRIKEDSFFNWNDKEFDKHPLFGNLKEEKKFHNNYPTVFHLRNEIGKNSSKKFDLRLVYLALAHIIKYRGHFLDETFDPDASVSVEKRLNDFIVEYNELFDKDLRSEAKFSEILMSDSSNSVKIESTLSLYPSEKNTIFQVFLKLIVGNQGDFNKFFKDELESSSHSGKLVFSSDEVEDEKEELISIIGEDYLDIINLCQSLYSTVALAKIISTDTGESNTPLSASMVKRYNEHKGDLANLKGIVKHFIPEKYEEVFGEHSKTGYTAYIRNPNKMPEKKFYDYLYHEGEKGKISGILSDSRIYELPAVQKFILKIEQKSFLKKQRTKENGLIPYQLHLKELKIIIENQSEYYPFLHEIEEKLEKLLTFRIPYFVGPLAQTKYINPRFNWLVRKSEDHIKPWNFSEIVDEEKSATKFIEKLISNDQFLFGEKVLPKRSIIYQQFLIFNELTKVSYQIKDGPSRNFDSETKEEIFNSLFKKNKLGCVTVVDLKNYIKNDQCLSEKEDIQIEGIKKKFNSSYSTYADLSEISGLKELLDDDTQLDLVEEIIRILTVFEDKKMRTKQLEKLNLPANVDIEKLCKKHYKGWANVSRQLIDGIADRSRGFKKTILDYLKDDDIPNNDAFSTKVQKSLNRNFAQLITDKSLDFARKLDESYKIDVKKDYPSLVEDIPGSPAIRRAILQSLYTVDEIIGVMGRMPKNIVIEMARTNEVSDSPKTRKERIKKLIKETENDADALNFGISKVSEIFDEVKKDENLFKELEVYLYFLQEGKDMYGTETREGHRQPKEINFYDVKNSTGKYHIDHIIPQSLYSGNPLDNIVLTESTNNKIKDKDVPDEATVYEMKNFWLYLMKKGAISKKKFSFLTKIEQGGLSNEDKFGFINR

SEQ ID NO: 178 - protein, 1052 aa, Aminomonas paucivorans
MIGEHVRGGCLFDDHWTPNWGAFRLPNTVRTFTKAENPKDGSSLAEPRRQARGLRRRLRRKTQRLEDLRRLLAKEGVLSLSDLETLFRETPAKDPYQLRAEGLDRPLSFPEWVRVLYHITKHRGFQSNRRNPVEDGQERSRQEEEGKLLSGVGENERLLREGGYRTAGEMLARDPKFQDHRRNRAGDYSHTLSRSLLLEEARRLFQSQRTLGNPHASSNLEEAFLHLVAFQNPFASGEDIRNKAGHCSLEPDQIRAPRRSASAETFMLLQKTGNLRLIHRRTGEERPLTDKEREQIHLLAWKQEKVTHKTLRRHLEIPEEWLFTGLPYHRSGDKAEEKLFVHLAGIHEIRKALDKGPDPAVWDTLRSRRDLLDSIADTLTFYKNEDEILPRLESLGLSPENARALAPLSFSGTAHLSLSALGKLLPHLEEGKSYTQARADAGYAAPPPDRHPKLPPLEEADWRNPVVFRALTQTRKVVNALVRRYGPPWCIHLETARELSQPAKVRRRIETEQQANEKKKQQAEREFLDIVGTAPGPGDLLKMRLWREQGGFCPYCEEYLNPTRLAEPGYAEMDHILPYSRSLDNGWHNRVLVHGKDNRDKGNRTPFEAFGGDTARWDRLVAWVQASHLSAPKKRNLLREDFGEEAERELKDRNLTDTRFITKTAATLLRDRLTFHPEAPKDPVMTLNGRLTAFLRKQWGLHKNRKNGDLHHALDAAVLAVASRSFVYRLSSHNAAWGELPRGREAENGFSLPYPAFRSEVLARLCPTREEILLRLDQGGVGYDEAFRNGLRPVFVSRAPSRRLRGKAHMETLRSPKWKDHPEGPRTASRIPLKDLNLEKLERMVGKDRDRKLYEALRERLAAFGGNGKKAFVAPFRKPCRSGEGPLVRSLRIFDSGYSGVELRDGGEVYAVADHESMVRVDVYAKKNRFYLVPVYVADVARGIVKNRAIVAHKSEEEWDLVDGSFDFRFSLFPGDLVEIEKKDGAYLGYYKSCHRGDGRLLLDRHDRMPRESDCGTFYVSTRKDVLSMSKYQVDPLGEIRLVGSEKPPFVL

SEQ ID NO: 179 - protein, 1023 aa, Helicobacter cinaedi
MKIYSFDIGVASIGWAFIENEVLQDCGIRIFTKAENPKNGASLALPRREARGVRKRLARRRGRLNTIKQLLCKEFGLQLEDYLSNDGELPKAYTASKANPLKSPYELRTLALSQKLDSKDLVRVILHIAKHRGYGNKHAKDSKDTESGKVKKAIEFNRKTLAEKGYRSVGEYLYREFFQQSRISQNNGATEFINVRNKAGNYEHCVAQDMLKEELESILNAQRQFGFSLKQDFENKLLTKIFEQRPLKSFADKVGNCCFIAGEKRAPKDSPSAIEFIALSRTINTLINLSKESGEIYNRAIILQIVESTLKKGEISYKELREIIRLDERLRFKDPRLDYSREIKEAEKVKFLEFKQLKGFKKALGESFTTLAISQLDEIAEHIALIKDRVKLNEKLESYALTKEQREALSNLSFSAHINLSLQALKQILPFMRGDNGEQCLDYDESVEKAGLKALSKDTLKGQMLPPLNEFEPYLSNPVVARALAEYRKVLNVLLKQYGSPHKIHIEYAREAKLSSTERQKYEKEQKDNYAANQAAHKKCQELGLEPSSTNLLKLKLWQEQGGLCLYSGAKITISYLQDPTALQVDHIYPYSRSFDDSYMNKCLVLTKANQEKGNRTPFEAFGTDSAKWGVITTLAQKLPHKKRRRILNTAFNDKEAGFKLRNLNDTSYIARLVADYTETYLEFLPLVESENTTLSKGQKGSKKHIAIVNGVLTSTMRYYLGFASKDRDNHLHHALDAVIIGFMNDSVIKAFSDFKKTQETSKAAYYAHTLSKQEYKKQRAFIQLPSGENFRVSVLEKVESVFVSKPPRKRVRGALHEATFYSPNDPKLLKNYGGTKGVERALALGKMRKVGAKIVSNGAMVRVDIFRHKSSGKFYGVPVYTMDFALGILPNKAVVVGKDQNGVIKDWLEMDSSYEFIFSLYKDDVILVQKKEMQRPELCYFVSFDTSGASIKVAKHDNNFSTLTENQKLLFSNATKEEVVGKSIGIQNLKVFEKWQVSVLGEVKRTQSYPRENISLASKAKK

SEQ ID NO: 180 - protein, 874 aa, Listeria seeligeri
LANGQSEFSWLTRKADGEIRPWNIEEKVDFGKSAIDFIEKMTNKDTYLPKENVLPKHSMCYQKYMVYNELTKIRYTDDQGKTHYFSGQEKQQIFNDLFKQKRKVKKKDLELFLYNMNHVESPTVEGVEDAFNSSFTTYHDLQKVGVPQEILDDPLNTEMLEEIIKILTVFEDKRMINERLQEFSNVLDEAVLKKLERRHYTGWGRLSAKLLIGIRDKESHLTILDYLMNDDKHNRNLMQLINDSNLSFKSIIEKEQVSTADKDIQSIVADLAGSPAIKKGILQSLKIVDELVGIMGYPPQTIVVEMARENQTTGKGKNNSKPRFTSLEKAIKELGSQILKEHPTDNQGLKNDRLYLYYLQNGKDMYTGQELDIHNLSNYDIDHVVPQSFITDNSIDNRVLASSAANREKGDNVPSLEVVRKRKVYWEKLYQAKLMSKRKFDYLTKAERGGLTEADKARFIHRQLVETRQITKNVANILHQRFNCKKDESGNVIEQVRIVTLKAALVSQFRKQFQLYKVREVNDYHHAHDAYLNCVVANTLLKVYPQLEPEFVYGDYHQFDWFKANKATAKKQFYTNIMLFFAKKDRIIDENGEILWDKKYLDTIKKVLNYRQMNIVKKTEIQKGEFSNATANPKGNSSKLIPRKADWDPIKYGGFDGSNMAYAIVIEHEKRKKKTVIKKELIQINIMERTAFEKDQKEFLEGKGYRNPKVITKIPKYTLYECENGRRRMLGSANEAQKGNQMVLPNHLMTLLYHAKNCEASDGKSLAYIESHREMFAELLDSISEFASRYTLADANLEKINTIFEQNKSGDVKVIAQSFVNLLEFNAMGAPASFKYFETNIERKRYNNLKELLNATIIYQSITGLYEARKRLDD

SEQ ID NO: 181 - protein, 1082 aa, Neisseria lactamica
MAAFKPNPMNYILGLDIGIASVGWAMVEIDKEENPIRLIDLGVRVFERAEVPKTGDSLAMARRLARSVRRLTRRRAHRLLRARRLLKREGVLQDADFDENGLVKSLPNTPWQLRAAALDRKLTCLEWSAVLLHLIKHRGYLSQRKNEGETADKELGALLKGVADNAHALQTGDFRTPAELALNKFEKESGHIRNQRGDYSHTFSRKDLQAELNLLFEKQKEFSNPHVSDSLKEGIETLLMAQRPALSGDAVQKMLGHCTFEPAEPKAAKNTYTAERFIWLTKLNNLRILEQGSERPLTDTERATLMDEPYRKSKLTYAQARKLLGLEDTAFFKGLRYGKDNAEAPTLMEMKAYHAISRALEKEGLKDKKSPLNLSTELQDEIGTAFSLFKTDKDITGRLKDRVQPEILEALLKHISFDKFVQISLKALRRIVPLMEQGKRYDEACAEIYGDHYCKKNAEEKIYLPPIPADEIRNPVVLRALSQARKVINCVVRRYGSPARIHIETAREVGKSFKDRKEIEKRQEENRKDREKAAAKFREYFPNFVGEPKSKDILKLRLYEQQHGKCLYSGKEINLVRLNEKGYVEIDHALPFSRTWDDSFNNKVLVLGSENQNKGNQTPYEYFNGKDNSREWQEFKARVETSRFPRSKKQRILLQKFDEEGFKERNLNDTRYVNRFLCQFVADHILLTGKGKRRVFASNGQITNLLRGFWGLRKVRAENDRHHALDAVVVACSTVAMQQKITRFVRYKEMNAFDGKTIDKETGEVLHQKAHFPQPWEFFAQEVMIRVFGKPDGKPEFEEADTPEKLRTLLAEKLSSRPEAVHEYVTPLFVSRAPNRKMSGQGHMETVKSAKRLDEGISVLRVPLTQLKLKGLEKMVNREREPKLYDALKAQLETHKDNPAKAFAEPFYKYDKAGNRTQQVKAVRIEQVQKTGVWVRNHNGIADNATMVRVDVFEKGGKYYLVPIYSWQVAKGILPDRAVVAFKDEEDWTVMDDSFEFRFVLYANDLIKLTAKKNEFLGYFVSLNRATGAIDIRTHDTDSTKGKNGIFQSVGVKTALSFQKNQIDELGKEIRPCRLKKRPPVR

SEQ ID NO: 182 - protein, 1326 aa, Streptococcus pseudoporcinus
MLGTVLFDSGETAQARRLKRTNRRRYTRRRYRLCQLQNIFATEMVKVDDTFFQRLSESFFYYQDKAFDKHPIFGNSKEERAYHKTYPTIYHLRKDLADRDQKADLRLIYLALSHIIKFRGHFLIEGKLNSENTDVQKLFIALVTVYNLLFEEEPIAGETCDAKALLTAKTSKSKRLESLISEFPGQKKNGLFGNLLALALGLRPNFKSNFGLSEDAKLQITKDTYEEELDNLLAEIGDHYADLFLAAKNLSDAILLSDILTLSDENTRAPLSASMIKRYEEHQEDLALLKKLVKEQMPEKYWEIFSNAKKNGYAGYIEGKVSQEDFYRYIKPILSRLKGGDEFLAKIDRDDFLRKQRTFDNGSIPHQIHLKELHAILRRQEKYYPFLAEQKEKIEQLLCFRIPYYVGPLAKGGNSSFAWLKRRSDEPITPWNFKDVVDEEASAQAFIEGMTNYDTYLPEEKVLPKHSPLYEMFTVYNELTKVKYIAENMTKPLYLSAEQKEAIIDHLFKQTRKVTVKDLKEKYFSQIEGLENVDVTGVEGAFNASLGTYNDLLKIIKDKAFLDDEANAEILEEIVLILTLFQDEKLIEKRLAKYANLFEKSVLKKLRKRHYRGWGRLSRQLIDGMKDKASGKTILDFLKADDFANRNFIQLINDSSLDFEKLIDDAQKKAIKRESLTEAVANLAGSPAIKKGILQSLKVVDEIVKVMGHNPDNIVIEMSRENQTTAQGLKNARQRLKKIKEVHKKTGSRILEDNSERITNLTLQDNRLYLYLLQDGKDMYTGQDLDINNLSQYDIDHIIPQSFIKDNSIDNLVLTTQKANRGKSDNVPSIEVVRDMKDRVWRRQLANGAISRQKFDHLTKAERGGLADSDKARFLRRQLVETRQITKHVAQLLDSRFNSKSNQNKKLARNVKIITLKSKIVSDFRKDFGLYKLREVNNYHHAHDAYLNAVVGTALLKKYPKLEAEFVYGDYKHFDLVKLISKSDPSLGKATAKVFFYSNIMNFFKEELSLADGTLMKRPVIETNTETGEVVWDKVKDFKTIRKVLSYPQVNIVKKTEIQSGAFSKESVLSKGNSDKLIERKKGWDPKKYGGFDSPNTAYSIFVVAKVAKRKAQKLKTVKEIVGITIMEQAEYEKDNIAFLEKKGYQDIQEKLLIKLPKYSLFELENGRRRLLASANEFQKGNELALSGKYMKFLYLASRYDKLSSKIESEQQKKLFVEQHLHYFDEILDIVVKHATCYIKAENNLKKIISLYKKKEAYSINEQALNMLNLFIFTSLGAPSTFVFFDETIDRKRYTTSSDVLNGILIQQSITGLYETRIDLSRFGGD

SEQ ID NO: 183 - protein, 1150 aa, Enterococcus faecalis
MYSIGLDLGISSVGWSVIDERTGNVIDLGVRLFSAKNSEKNLERRTNRGGRRLIRRKTNRLKDAKKILAAVGFYEDKSLKNSCPYQLRVKGLTEPLSRGEIYKVTLHILKKRGISYLDEVDTEAAKESQDYKEQVRKNAQLLTKYTPGQIQLQRLKENNRVKTGINAQGNYQLNVFKVSAYANELATILKTQQAFYPNELTDDWIALFVQPGIAEEAGLIYRKRPYYHGPGNEANNSPYGRWSDFQKTGEPATNIFDKLIGKDFQGELRASGLSLSAQQYNLLNDLTNLKIDGEVPLSSEQKEYILTELMTKEFTRFGVNDVVKLLGVKKERLSGWRLDKKGKPEIHTLKGYRNWRKIFAEAGIDLATLPTETIDCLAKVLTLNTEREGIENTLAFELPELSESVKLLVLDRYKELSQSISTQSWHRFSLKTLHLLIPELMNATSEQNTLLEQFQLKSDVRKRYSEYKKLPTKDVLAEIYNPTVNKTVSQAFKVIDALLVKYGKEQIRYITIEMPRDDNEEDEKKRIKELHAKNSQRKNDSQSYFMQKSGWSQEKFQTTIQKNRRFLAKLLYYYEQDGICAYTGLPISPELLVSDSTEIDHIIPISISLDDSINNKVLVLSKANQVKGQQTPYDAWMDGSFKKINGKFSNWDDYQKWVESRHFSHKKENNLLETRNIFDSEQVEKFLARNLNDTRYASRLVLNTLQSFFTNQETKVRVVNGSFTHTLRKKWGADLDKTRETHHHHAVDATLCAVTSFVKVSRYHYAVKEETGEKVMREIDFETGEIVNEMSYWEFKKSKKYERKTYQVKWPNFREQLKPVNLHPRIKFSHQVDRKANRKLSDATIYSVREKTEVKTLKSGKQKITTDEYTIGKIKDIYTLDGWEAFKKKQDKLLMKDLDEKTYERLLSIAETTPDFQEVEEKNGKVKRVKRSPFAVYCEENDIPAIQKYAKKNNGPLIRSLKYYDGKLNKHINITKDSQGRPVEKTKNGRKVTLQSLKPYRYDIYQDLETKAYYTVQLYYSDLRFVEGKYGITEKEYMKKVAEQTKGQVVRFCFSLQKNDGLEIEWKDSQRYDVRFYNFQSANSINFKGLEQEMMPAENQFKQKPYNNGAINLNIAKYGKEGKKLRKFNTDILGKKHYLFYEKEPKNIIK

SEQ ID NO: 184 - protein, 1150 aa, Enterococcus faecalis
MYSIGLDLGVSSVGWSVIDERTGNVIDLGVRLFSAKNSEKNLERRTNRGGRRLIRRKTNRLKDAKKILAAVGFYEDKSLKNSCPYQLRVKGLTEPLSKGEIYKVTLHILKKRGISYLDEDDTEAAKESQDYKEQVRENAQLLTKYTPGQIQLQRLKENNRVKTGINAQGNYQLNVFKVSAYANELATILKTQQAFYPNELTDDWIALFVQPGIAEEAGLIYRKRPYYHGPGNEANNSPYGRWSDFKKTGQPATNIFDKLIGKDFQGELRASGLSLSAQQYNLLNDLTNLKIDGEIPLSPEQKEYILAELMTKEFTRFGINDVAKLLGVKKERLSGWRLDKKGKPEIHTLKGYRNWRKIFAESGIDLATLPTETIDCLAKVLTLNTEREGIENTLAFELPELAESVKLLVLDRYKELSQSVSTQAWHRFSLKTLHLLIPELMNATSEQNTLLEQFQLKSDVRKRYSEYKKLPTKDVLTEIYNPTVNKTVSQAFKVIDALLVKYGKEQIRYITIEMPRDDNEEDEKKRIKELHAKNSQRKNDSQSYFMQKSGWSQEKFQTTIQKNRRFLAKLLYYYEQDGICAYTGLSISPELLVSDSTEIDHIIPISISLDDSINNKVLVLSKANQVKGQQTPYDAWMDGSFKKINGKFSNWDDYQKWVESRHFSHKKENNLLETRNIFDSEQVEKFLARNLNDTRYASRLVLNTLQSFFANQETKVRVVNGSFTHTLRKKWGADLDKTRETHHHHAVDATLCAVTPFVKVSRYHYAVKEETGEKVMREIDFETGEIVDEMSYREFKKSKKYERKTYQVKWPNFREQLKPVNLHPRIKFSHQVDRKANRKLSDATIYSVREKTEVKTLKSGKQKITTDEYTIGKIKDIYTVDGWEAFKKKQDKLLMKDLDEKTYERLLSIAETTPDFQEVEEKNGKVKRVKRSPFAVYCEENDIPAIRKYAKNNNGPLIRSLKYYDGKLNKHINITKDSQGRPVEKTKNGRKVTLQSLKPYRYDIYQDLETKAYYTVQLYYSDLRFVEGKYGITEKEYMKKVAEQTKGQVVRFCFSLQKNDGLEIEWKDSQCYDVRFYNFQSANSINFKGLEQEMMPAENQFKQKPYNNGAINLNIAKYGKEGKKLRKFNTDILGKKHYLYYEKEPKNIIK

SEQ ID NO: 185 - protein, 1345 aa, Streptococcus anginosus
MDQKYSIGLDIGTNSVGWAVVTDDYKVPAKKMKVLGNTDKQSIKKNLLGALLFDSGETAEATRLKRTARRRYTRRRNRLRYLQEIFAEEMNKVDENFFQRLDDSFLVDEDKRGERHPIFGNIAAEVKYHDDFPTIYHLRKHLADISQKADLRLVYLALAHMIKFRGHFLIEGQLKAENTNVQALFKDFVEVYDKTVEESHLSEMTVDALSILTEKVSKSRRLENLIAHYPAEKKNTLFGNLIALSLGLQPNFKTNFQLSEDAKLQFSKDTYEEDLEGLLGEIGDEYADLFASAKNLYDAILLSGILTVDDNSTKAPLSASMVKRYEEHQKDLKKLKDFIKVNAPDQYNAIFKDKNKKGYAGYIENGVKQDEFYKYLKGILLQINGSGDFLDKIDREDFLRKQRTFDNGSIPHQIHLQEMHAILRRQEEHYPFLKENQDKIEKILTFRIPYYVGPLARKGSRFAWAEYKADEKITPWNFDDILDKEKSAEKFITRMTLNDLYLPEEKVLPKHSLLYETFTVYNELTKVKYVNEQGEAKFFDANMKQEIFDHVFKENRKVTKDKLLNYLNKEFEEFRIVNLTGLDKENKAFNSSLGTYHDLRKILDKSFLDDKANEKTIEDIIQTLTLFEDREMIRQRLQKYSDIFTKAQLKKLERRHYTGWGRLSYKLINGIRNKENKKTILDYLIDDGYANRNFMQLINDDALSFKEEIARAQIIGDVDDIANVVHDLPGSPAIKKGILQSVKIVDELVKVMGHNPANIIIEMARENQMTDKGRRNSQQRLKLLQDSLKNLDNPVNIKNVENQQLQNDRLFLYYIQNGKDMYTGETLDINNLSQYDIDHIIPQAFIKDNSLDNRVLTRSDKNRGKSDDVPSIEVVHEMKSFWSKLLSVKLITQRKFDNLTKAERGGLTEEDKAGFIKRQLVETRQITKHVAQILDERFNTEFDGNKRRIRNVKIITLKSNLVSNFRKEFELYKVREINDYHHAHDAYLNAVVGNALLLKYPQLEPEFVYGEYPKYNSYRSRKSATEKFLFYSNILRFFKKEDIQTNEDGEIAWNKEKHIKILRKVLSYPQVNIVKKTEEQTGGFSKESILPKGESDKLIPRKTKNSYWNPKKYGGFDSPVVAYSILVFADVEKGKSKKLRKVQDMVGITIMEKKRFEKHPVDFLEQRGYRNVRLEKIIKLPKYSLFELENKRRRLLASARELQKGNELVIPQRFTTLLYHSYQIEKNYEPEHREYVEKHKDEFKELLEYISVFSRKYVLADNNLTKIEMLFSKNKDAEVSSLAKSFISLLTFTAFGAPAAFNFFGENIDRKRYTSVTECLNATLIHQSITGLYETRIDLSKLGED

SEQ ID NO: 186 - protein, 849 aa, Listeria ivanovii
  misc_feature (780)..(780): Xaa can be any naturally occurring amino acid
LIDKNGTPQHITMIDKMRGKCTYFPEEVRIAKMSYTAELFGLLNDFNNIYFADPETGEKIGFTEADKKYFIDTFIHDQKGVKNITLKQIMKHKNIINETDIFGYRINTKNGTPIFTEFKGLKALKKALKEVDLPDEFYQNTEMMDEIANILSSEKSFTRREEQLKELFLAAFNDELEEAVKELINDITFKEFHSLSKKAIMVILPELWSTNQNQMQLFVQHKMDKSRLENLQNGTKIQFDDEAILSTIAKRAHRETIKIVDAVRAKYGELDYVIVEMAREKNSDEQKKVYNRAQKKQGDFEKEMCKLLGVSELKELRLNGKQHLALKFWKEQDGKCIYSGKPIALSDIVNNFNGLLEIDHIIPISISYDDSQQNKVLCLRSENQRKGQLSPYQYLIRGMGERSFDAFKAEVLSRHFGKKKQNYLLEMEDIANNDELRKHFINRNLVDTRYAMRTFSNTLKTFYTVNGIPTKVMPVNGAMTSALRKRAKLNKDRDAGHAHHAIDALIVAAIGRLPLIKQLAELRVNEEGEFADKITDKGLDDKTAFDDKTLKFLRNLLNYESKVKYSHKVDRKPNRSLSKQTLYSTREKDGEKYIIGKVKNIYTLDKAGYAALKKRIDKNPEDFLMAQHNPKTWEEIIKIMEVYSKADNPFKEFYDEHGFIMKDGKVPVKSLRYHDKKLGIHVPLTHKYENTRHDVVLLKRNSLRVDIYMNKEGVYKYQGVPYNWFNQKGDKYILDMEKYHNEIDGTRASFKNIDNTFEFQFSLYKNDVFSYMKKDKEGEXVSYTKLFRSDSSPRENRLEVENIDMRTSSQQMPTINPLKNLIKYNTDILGNTYPIQKEKFVTVFTLHSK

SEQ ID NO: 187 - protein, 1457 aa, Prevotella buccae
MKTILGLDLGTNSIGWAKVSVDDYGNYLHDIKLGSRIIPMSQDVLGNFDSGVTVSQTAQRTEFRSKRRLVQRNLQRRERLHRVLHVLDFLPAHYDAAIGWDRTEAVTYGKFLNHAEPKLAWEELGNGKRRFLFMDSFHEMVADFARCQPALVADGKKIPLDWTIYYLRKKALTQAITKEELAWILLNFNQKRGYYQLRGEEEEENPTKQEEYYELKVVSVEATDSRKGNDTWYNVHLENGWIYRRSSKISLDDWVGKVKQFIVTTEYEKDGATLKTDKEGYVKRSFRAPNENDWGLRKKRTETLLEMSGKTVGAFIYDHLLQEPADKIRGNFIRTIERHYYKAELEAILAEQCKYHIELRDKEMLEACARELYLNNLPHQRSLMKKDMTYLLLYDLIFYQRPLKSKKALIANCPYEYYEYVDKETGEIKRQNIKCIAKSNPYFQEFRLWQFVLNLRLFDRVEDKEVTANYLPTADDHARLFTYLNDRKEINQETLLKDYFKLKKVKIGNEKEYPIRWNYIEDKEKKYPCNETRYELLMALDRAGIEHKWLDDNNLEYRLWHLLYSVEVKSESETALRKLKNDDAFVNSFLKVKPFKKEYGAYSEKAIKRLLAVMRKGFLWNEQDICDETRKRIEIIIKGDVDEKVKERMGHAAYSFDRVSDFQGLPEWLACYVVYGRHSEAMDIQHWDSPERLMAYINNFKQYSLRNPIVEQCILETLRTVHDIWKETGQIDEIHVELGREMKSTSEERARRTQNVLRNENTNLRIKSLLIELKNDTDICNVHPYSPMQQEILRIYEEGALQELNREDEDFEEISKISQMSQPSGKELNRYKLWLEQKYRSPYTGKAISLAKLFTPAYQIEHVIPQSRYFDDSFTNKVICEAEVNTLKSNLLGYEFIKKHGGEIIHCTTLGDVRIFSESEYKAFVMDHYANNKSKKDKLLMEDIPQEFLSRQMNDSRYISKVVKTLLSNIVRMADESEATSKSVIVCTGGVTDRLKKDWGLNDVWNSIVYSRFERLNRLTGTEAFGHWENKDGKRVFQTSMPLELQRGFRKKRIDHRHHAMDALVIACASRNIVNYLNNESANNPKKREDLRRQLCDKNRVIRKPWETFTQDAYNALENVVVSFKNYVRVINKATNRYEHYDENGKKRFVQQKGSELWAIRKPMHKETYYGHVNLRRKELVTLQKALDDIPSICDKKLRDYISALVEKHFNKRQLLAHFKSTDYYWQKQYVNKVYVWTFSDDIKPLVATRKLLDTSFDAKRIGTITDTGIQKILRNYLEAKGGNATLAFTPEGIAEMNQNISKYNDGKPHQPILKVRITEPMGAKYRVGQTGNKMAKYVEAQSGTNLYFAIYEDSEGKRSYTTVPLDEVAERLKQRLSPVPEKDENDVPLKFYLSPNDLVYVPTEEELQLRECKLNKDRIYKMVSSTGNECHFIPYYVANVIYNKGGFNMQMHRPQS

SEQ ID NO: 188 - protein, 1330 aa, Enterococcus italicus
MKNDYTIGLDIGTNSVGYSVVTDDYKVISKKMNVFGNTEKKSIKKNFWGVRLFESGQTAQEARMKRTSRRRIARRKNRICYLQEIFQPEMNHLDNNFFYRLNESFLVADDAKYDKHPIFGTLDEEIHFHEQFPTIYHLRKYLADGDEKADLRLVYLAIAHIIKFRGNFLIEGELNTENNSVIELSKVFVQLYNQTLSELEGFQFIDESIDFSEVLTQQLSKSERADNVLKLFPDEKGTGIFAQFIKLIVGNQGNFKKVFQLEEDQKLQLSTDDYEENIENLLAIIGDEYGDIFVAAQNLYQAILLAGILTSTEKTRAKLSASMIQRYEEHAKDLKLLKRFVKEHIPDKYAEIFNDATKNGYAGYIDGKTKEEEFYKYLKTTLVQKSGYQYFIEKIEQENFLRKQRIYDNGVIPHQVHAEELRAILRKQEKYYSFLKENHEKIEQIFKVRIPYYVGPLAKHNEQSRFAWNIRKSDEPIRPWNMNDVVDENASAVAFIERMTIKDIYLNENVLPRHSLIYEKFTVFNELTKVLYADDRGVFQRFSAEEKEDIFEKLFKSERKVTKKKLENYLRIELSISSPSVKGIEEQFNANFGTYLDLKKFDELHPYLDDEKYQDTLEEVIKVLTVFEDRSMIQNQLEQLPLNLSTKTIKALSRRKYTGWGRLSARLIDGIHDKNSGKTILDYLIEDESDSYIVNRNFMQLINDDHLSFKKIIEDSQPYKEQQSAEEIVSELSGSPAIKKGILQSLKIVDELVAIMGYKPKNIVVEMARENQTTGRGKQNSKPRLKGIENGLKEFSDSVLKGSSIDNKQLQNDRLYLYYLQNGKDMYTGHELDIDHLSTYDIDHIIPQSFLTDNSIDNRVLTTSKSNRGKSDNVPSEEVVRKMDRFWRKLLNAKLISERKYTNLTKKELTESDKAGFLKRQLVETRQITKHVATILDSKFNEDSNNRDVQIITLKSALVSEFRKTFNLYKVREINDLHHAHDAYLNAVVALSLLRVYPQLKPEFVYGEYGKNSIHDQNKATIKKQFYSNITRYFASKDYIINDDGEILWNKQETIAQVIKTLGMHQVNVVKKVEIQKGGFSKESIQPKGESQKLIRRKQQWNTKKYGGFDSPVVAYAILLSFDKGKRKARSFKIVGITIQDRESFEGNPILYLSKKDYHNPKVEAILPKYSLFEFENGRRRMVASASETQKGNQLIIPGHLMELLYHSKKIINGKNSDSVSYIQNNKEKFREIFEYIVDFSSKYISADANLNKIEKIFENNFHKASEQEIAKSFINLLTFTAMGAPADFEFFGEKIPRKRYVSISEIIDAVFIHQSITGLYETRVRLTEV

SEQ ID NO: 189 - protein, 1123 aa, Mobiluncus curtisii
MFVYLNSPRGFGPATFLTDLPHFCIIFGNNDFMDNRKYHVGIDVGTNSVGFAAVEVGDSGSPIRFLNTMVVIHDSGVDPEQKKYAITRLASAGTARRTRRLYRTRRQRLRELDDFISNELGYPLVNLENFADPYEPWKVRADLATIKLPADELPEAMSIALRHMARHRGWRSPYQRVEALHLHAEISEEFSALKKRVMEKTGDVFSDDATPAEVLVDLMGRQKIRGADGMLSGKLRQSDNANELRKIASVQGIDDETLNRIIDRVFFSRSPKGKASERVGMDALPGQGSKPRALKAMPSFQKFRIVSVICNLRIKDSGDDNRPLSMEEKEQLIGYLMSSTTDDHVTWTDVAELLHVKRSNLQGTAKEGPDGERPYTRPPVNSAWSKIKDSKIKSLVALWKTGDVDVQSAIVEALSNASVLEDARPGADIVVAYLESLDDKELESLDKVGLPAGRASYSEDSLERLTERMLQDDCDLFEARKREFGVSDDWKPPADPIYAPVGNPGVDRVLKIVNRLLMAAEREWGAPTQINIEHVRSGFSSELMQREFERENERRRAQNEEAVKAILTEKGGNSHVSKYDIIRYYAVKRQNCQCLYCGTPITFSDCELDHIVPRKGVGSTNSRVNLAAACRSCNRDKSNLPFAVWAGKTSNFDVSIDGAVSRVKQWQRSQNEGAREFRAFQNEVISRLLKTTEDPEIDSRSLESVAWMARELHHRVEYYFQSKGAQTQVSVYRGAVTAQARKSSGLEDKVKMIGGGGKTRLDRRHHAMDAATIALMTPGISTTLSEKNNLRDAQKFTGQSETWKDYCGRTETAREHFAVWKSNMERLTDLFNDKLENDAIPVVQPLRLRLSDSKAHDDGIGKLDSKKLGSVWSLADIDRAATPQIWTALTRCDDFDPTKGLPENANRVIRAQGVKYESEDNIPVFPSNVAAIAVRDGYAEIGSTIHHARIYRIDDGKKIFYSMIRVFAVDLLKHQAEDLFTVKLPPSAISIRTCEDSLRRALSNGTAEYLGWLVPGDEIIVDTSDKAFHTGQIGDLLRNFPVNSFRLTGFPSNSRLRLKPVLLAGEGLRDDAEDSIKKILSGQGWRPAINVLFSKGKPRIVRRNSLGIERPSSNNGLPFSWEA

SEQ ID NO: 190 - protein, 1054 aa, Staphylococcus lugdunensis
MNQKFILGLDIGITSVGYGLIDYETKNIIDAGVRLFPEANVENNEGRRSKRGSRRLKRRRIHRLERVKKLLEDYNLLDQSQIPQSTNPYAIRVKGLSEALSKDELVIALLHIAKRRGIHKIDVIDSNDDVGNELSTKEQLNKNSKLLKDKFVCQIQLERMNEGQVRGEKNRFKTADIIKEIIQLLNVQKNFHQLDENFINKYIELVEMRREYFEGPGKGSPYGWEGDPKAWYETLMGHCTYFPDELRSVKYAYSADLFNALNDLNNLVIQRDGLSKLEYHEKYHIIENVFKQKKKPTLKQIANEINVNPEDIKGYRITKSGKPQFTEFKLYHDLKSVLFDQSILENEDVLDQIAEILTIYQDKDSIKSKLTELDILLNEEDKENIAQLTGYTGTHRLSLKCIRLVLEEQWYSSRNQMEIFTHLNIKPKKINLTAANKIPKAMIDEFILSPVVKRTFGQAINLINKIIEKYGVPEDIIIELARENNSKDKQKFINEMQKKNENTRKRINEIIGKYGNQNAKRLVEKIRLHDEQEGKCLYSLESIPLEDLLNNPNHYEVDHIIPRSVSFDNSYHNKVLVKQSENSKKSNLTPYQYFNSGKSKLSYNQFKQHILNLSKSQDRISKKKKEYLLEERDINKFEVQKEFINRNLVDTRYATRELTNYLKAYFSANNMNVKVKTINGSFTDYLRKVWKFKKERNHGYKHHAEDALIIANADFLFKENKKLKAVNSVLEKPEIESKQLDIQVDSEDNYSEMFIIPKQVQDIKDFRNFKYSHRVDKKPNRQLINDTLYSTRKKDNSTYIVQTIKDIYAKDNTTLKKQFDKSPEKFLMYQHDPRTFEKLEVIMKQYANEKNPLAKYHEETGEYLTKYSKKNNGPIVKSLKYIGNKLGSHLDVTHQFKSSTKKLVKLSIKPYRFDVYLTDKGYKFITISYLDVLKKDNYYYIPEQKYDKLKLGKAIDKNAKFIASFYKNDLIKLDGEIYKIIGVNSDTRNMIELDLPDIRYKEYCELNNIKGEPRIKKTIGKKVNSIEKLTTDVLGNVFTNTQYTKPQLLFKRGN

SEQ ID NO: 191 - protein, 586 aa, Pseudoramibacter alactolyticus
MTYYLGLDMGTGSVGWAATDKNYKLIRAKGKDLWGVRLFQTAKTAAERRSHRVARLRRQREKVRIGYLKTIFSDAINKVDPGFFQRLDDSFFYAEDKNINQPYALFADTGYTDVDYYRDYPTIFHLRSTLIHDTSPKDVRLVYLAVLNMFKHRGHFLASNLSENGVDDFGDIYQQWCKSVPKPVQISDPEAKTEKIENILSKAGISNTRRLEALLEVFGIKRRDAFAEVLKLWCGLKGNLSKIWSETDFSDLDNTKPALSFKDSNLDMVLSQLEEILPDEDYSWLMLTKQIYDWSLLSGMMKDASGKSYDYLSDARVASYQKHSEDLKTLKRFYHDNHLSAAYDQMFRVMGKDNYSAYAGSVQSKKEVVRRGASCGIEELYKRIKKDLKPVPDCETKQIILENIERGTFLPKQLTRDNGVIPNQIHVHELKAILKNAENYLPFLKEGSELTNSEKILQLFQFQIPYYVGPLYSDENNYAWVVRKEGGRVFPWNFAEKVDEKASAEGFISELVARCTYLDNEKVLPKASLLYEKFMVLNELNNLRINGERISVDIKQELYQNLFTRGKKVTLKKSEGLFGGQRIFCL

SEQ ID NO: 192 - protein, 1385 aa, Gemella morbillorum
MKNKTWYLGLGVGPTSIGWAATDSNYKLLRKNKKRLWGVRLFEEAKTAVDRRTFRAERRRLARRKWRISLLEELFAKEVSKNDPNFFLRLKESKYHFEDKSLMNEYILFNDKDYTDKDYYKEYPTIYHLRLSLTTEENPDIRKVYLAVHSMLKNRGHFLLQGQSFNDSNIDSVIKELLELETVKINFEVTDEVIHSLKKIALEKKNLSDKNNDVKKLYPKEKQLQEIFKLVFGGKTSLDKLYDIEEYKELDNSVKSISFKEKVYEEVRPDYEQILSNYIELLDLAKLVYDSIVLADIKKEGKTISESKVELYNKHKDDLANLKKLVKIDSKLSEDKKKEVYFTIFKEDKEKGTNYVNYTHRSQEGKSCSYEDFKKFLKKELEKLEDSPTKTTILEELDLETFLPLQRTKDNSVVPYQIHKEELVKILDNAAKYHSFLAEKDDSGYSTREKVVQLFEFRIPYYIGPLNAHHNTENGGYSWAIRKKGMESVPVTPWNFKDVIDESASAEAFVNNLKNKCAYLSGEDVLPKNSLLYSEYALLNELNALRYEGNRISVEARDVIVTKLFKEQGKKVTKKTIKELLKTEGFIDGKGEIVGIDNIVKNDLKSYRDFKKILADKFDKERVENIILWITLYGESRKLIKEKITKVYGDFYTVDEIEKMSRLTYKDWGILSRKLLTELVSEKLYNEETGECLNIIGAMRQGTILFMELLADKFDYMSQIKNHNKENKDDITEITPDILENLHASPAVKRSIWQTVRIVEELKTIIGCVPTKIFIETTKRNNAPYKVPTLNRNDLVTKYKTIREHEIFELEKELKNTLDFTLNKNRLINEEPSKLKATKLYLYYTQLGRCMYTGKKIDLGELFDNNNKYDIDHIYPQSKVKDGSFNNIVLVTKASNDMKADVFPLKSKFQTKENKIFWRFLKEKKLITEEKYNRLVRTEEFSNGELTGFITRQLVETSQAIKVISNVLRELNPETTICYSKAENVSSFRQSFGKIKEANRKAENNEKLIRVQEINDYYNAKDAYLSIVVGNVYDVKFTRNVHNFIKNNKDARRYSLNGLFYTDVKNANTIAWEMDKTVHVVEKTMNNNNILITRRTSEQKGALYDATLYKAKVAEKAKEGTYYPLKTTDSKIKDVGKYGGFTKIKIAYYSIFEYTLDGKKGKQKITRIVPIPIYISQNIKDDKALLEYAQTRLPGKDLKIKYRKLCIGSLVKINNFNYYIGGKTNNNFTFDSAVQVILDKDSESYIKELAKYLNWKKENKDGKLWESITEDKNIQLYDSLVKKMNTGIFIRKTPNKYTELLTLEVKNKFINIDIDEQVKLLLEILNLLTNKKFTSKLNEIGITASRGVCSFNLSNQSQFSIIEQSVTGVYEKEKLIIEKKKEGIL

SEQ ID NO: 193 - protein, 1029 aa, Alicycliphilus denitrificans
MRSLRYRLALDLGSTSLGWALFRLDACNRPTAVIKAGVRIFSDGRNPKDGSSLAVTRRAARAMRRRRDRLLKRKTRMQAKLVEHGFFPADAGKRKALEQLNPYALRAKGLQEALLPGEFARALFHINQRRGFKSNRKTDKKDNDSGVLKKAIGQLRQQMAEQGSRTVGEYLWTRLQQGQGVRARYREKPYTTEEGKKRIDKSYDLYIDRAMIEQEFDALWAAQAAFNPTLFHEAARADLKDTLLHQRPLRPVKPGRCTLLPEEERAPLALPSTQRFRIHQEVNHLRLLDENLREVALTLAQRDAVVTALETKAKLSFEQIRKLLKLSGSVQFNLEDAKRTELKGNATSAALARKELFGAAWSGFDEALQDEIVWQLVTEEGEGALIAWLQTHTGVDEARAQAIVDVSLPEGYGNLSRKALARIVPALRAAVITYDKAVQAAGFDHHSQLGFEYDASEVEDLVHPETGEIRSVFKQLPYYGKALQRHVAFGSGKPEDPDEKRYGKIANPTVHIGLNQVRMVVNALIRRYGRPTEVVIELARDLKQSREQKVEAQRRQADNQRRNARIRRSIAEVLGIGEERVRGSDIQKWICWEELSFDAADRRCPYSGVQISAAMLLSDEVEVEHILPFSKTLDDSLNNRTVAMRQANRIKRNRTPWDARAEFEAQGWSYEDILQRAERMPLRKRYRFAPDGYERWLGDDKDFLARALNDTRYLSRVAAEYLRLVCPGTRVIPGQLTALLRGKFGLNDVLGLDGEKNRNDHRHHAVDACVIGVTDQGLMQRFATASAQARGDGLTRLVDGMPMPWPTYRDHVERAVRHIWVSHRPDHGFEGAMMEETSYGIRKDGSIKQRRKADGSAGREISNLIRIHEATQPLRHGVSADGQPLAYKGYVGGSNYCIEITVNDKGKWEGEVISTFRAYGVVRAGGMGRLRNPHEGQNGRKLIMRLVIGDSVRLEVDGAERTMRIVKISGSNGQIFMAPIHEANVDARNTDKQDAFTYTSKYAGSLQKAKTRRVTISPIGEVRDPGFKG

SEQ ID NO: 194 - protein, 1422 aa, Sutterella wadsworthensis
MTQSERRFSCSIGIDMGAKYTGVFYALFDREELPTNLNSKAMTLVMPETGPRYVQAQRTAVRHRLRGQKRYTLARKLAFLVVDDMIKKQEKRLTDEEWKRGREALSGLLKRRGYSRPNADGEDLTPLENVRADVFAAHPAFSTYFSEVRSLAEQWEEFTANISNVEKFLGDPNIPADKEFIEFAVAEGLIDKTEKKAYQSALSTLRANANVLTGLRQMGHKPRSEYFKAIEADLKKDSRLAKINEAFGGAERLARLLGNLSNLQLRAERWYFNAPDIMKDRGWEPDRFKKTLVRAFKFFHPAKDQNKQHLELIKQIENSEDIIETLCTLDPNRTIPPYEDQNNRRPPLDQTLLLSPEKLTRQYGEIWKTWSARLTSAEPTLAPAAEILERSTDRKSRVAVNGHEPLPTLAYQLSYALQRAFDRSKALDPYALRALAAGSKSNKLTSARTALENCIGGQNVKTFLDCARRYYREADDAKVGLWFDNADGLLERSDLHPPMKKKILPLLVANILQTDETTGQKFLDEIWRKQIKGRETVASRCARIETVRKSFGGGFNIAYNTAQYREVNKLPRNAQDKELLTIRDRVAETADFIAANLGLSDEQKRKFANPFSLAQFYTLIETEVSGFSATTLAVHLENAWRMTIKDAVINGETVRAAQCSRLPAETARPFDGLVRRLVDRQAWEIAKRVSTDIQSKVDFSNGIVDVSIFVEENKFEFSASVADLKKNKRVKDKMLSEAEKLETRWLIKNERIKKASRGTCPYTGDRLAEGGEIDHILPRSLIKDARGIVFNAEPNLIYASSRGNQLKKNQRYSLSDLKANYRNEIFKTSNIAAITAEIEDVVTKLQQTHRLKFFDLLNEHEQDCVRHALFLDDGSEARDAVLELLATQRRTRVNGTQIWMIKNLANKIREELQNWCKTTNNRLHFQAAATNVSDAKNLRLKLAQNQPDFEKPDIQPIASHSIDALCSFAVGSADAERDQNGFDYLDGKTVLGLYPQSCEVIHLQAKPQEEKSHFDSVAIFKEGIYAEQFLPIFTLNEKIWIGYETLNAKGERCGAIEVSGKQPKELLEMLAPFFNKPVGDLSAHATYRILKKPAYEFLAKAALQPLSAEEKRLAALLDALRYCTSRKSLMSLFMAANGKSLKKREDVLKPKLFQLKVELKGEKSFKLNGSLTLPVKQDWLRICDSPELADAFGKPCSADELTSKLARIWKRPVMRDLAHAPVRREFSLPAIDNPSGGFRIRRTNLFGNELYQVHAINAKKYRGFASAGSNVDWSKGILFNELQHENLTECGGRFITSADVTPMSEWRKVVAEDNLSIWIAPGTEGRRYVRVETTFIQASHWFEQSVENWAITSPLSLPASFKVDKPAEFQKAVGTELSELLGQPRSEIFIENVGNAKHIRFWYIVVSSNKKMNESYNNVSKS

SEQ ID NO: 195 - protein, 1132 aa, Nitratifractor salsuginis
MKKILGVDLGITSFGYAILQETGKDLYRCLDNSVVMRNNPYDEKSGESSQSIRSTQKSMRRLIEKRKKRIRCVAQTMERYGILDYSETMKINDPKNNPIKNRWQLRAVDAWKRPLSPQELFAIFAHMAKHRGYKSIATEDLIYELELELGLNDPEKESEKKADERRQVYNALRHLEELRKKYGGETIAQTIHRAVEAGDLRSYRNHDDYEKMIRREDIEEEIEKVLLRQAELGALGLPEEQVSELIDELKACITDQEMPTIDESLFGKCTFYKDELAAPAYSYLYDLYRLYKKLADLNIDGYEVTQEDREKVIEWVEKKIAQGKNLKKITHKDLRKILGLAPEQKIFGVEDERIVKGKKEPRTFVPFFFLADIAKFKELFASIQKHPDALQIFRELAEILQRSKTPQEALDRLRALMAGKGIDTDDRELLELFKNKRSGTRELSHRYILEALPLFLEGYDEKEVQRILGFDDREDYSRYPKSLRHLHLREGNLFEKEENPINNHAVKSLASWALGLIADLSWRYGPFDEIILETTRDALPEKIRKEIDKAMREREKALDKIIGKYKKEFPSIDKRLARKIQLWERQKGLDLYSGKVINLSQLLDGSADIEHIVPQSLGGLSTDYNTIVTLKSVNAAKGNRLPGDWLAGNPDYRERIGMLSEKGLIDWKKRKNLLAQSLDEIYTENTHSKGIRATSYLEALVAQVLKRYYPFPDPELRKNGIGVRMIPGKVTSKTRSLLGIKSKSRETNFHHAEDALILSTLTRGWQNRLHRMLRDNYGKSEAELKELWKKYMPHIEGLTLADYIDEAFRRFMSKGEESLFYRDMFDTIRSISYWVDKKPLSASSHKETVYSSRHEVPTLRKNILEAFDSLNVIKDRHKLTTEEFMKRYDKEIRQKLWLHRIGNTNDESYRAVEERATQIAQILTRYQLMDAQNDKEIDEKFQQALKELITSPIEVTGKLLRKMRFVYDKLNAMQIDRGLVETDKNMLGIHISKGPNEKLIFRRMDVNNAHELQKERSGILCYLNEMLFIFNKKGLIHYGCLRSYLEKGQGSKYIALFNPRFPANPKAQPSKFTSDSKIKQVGIGSATGIIKAHLDLDGHVRSYEVFGTLPEGSIEWFKEESGYGRVEDDPHH

SEQ ID NO: 196 - protein, 1327 aa, Solobacterium moorei
MEGQMKNNGNNLQQGNYYLGLDVGTSSVGWAVTDTDYNVLKFRGKSMWGARLFDEASTAEERRTHRGNRRRLARRKYRLLLLEQLFEKEIRKIDDNFFVRLHESNLWADDKSKPSKFLLFNDTNFTDKDYLKKYPTIYHLRSDLIHNSTEHDIRLVFLALHHLIKYRGHFIYDNSANGDVKTLDEAVSDFEEYLNENDIEFNIENKKEFINVLSDKHLTKKEKKISLKKLYGDITDSENINISVLIEMLSGSSISLSNLFKDIEFDGKQNLSLDSDIEETLNDVVDILGDNIDLLIHAKEVYDIAVLTSSLGKHKYLCDAKVELFEKNKKDLMILKKYIKKNHPEDYKKIFSSPTEKKNYAAYSQTNSKNVCSQEEFCLFIKPYIRDMVKSENEDEVRIAKEVEDKSFLTKLKGTNNSVVPYQIHERELNQILKNIVAYLPFMNDEQEDISVVDKIKLIFKFKIPYYVGPLNTKSTRSWVYRSDEKIYPWNFSNVIDLDKTAHEFMNRLIGRCTYTNDPVLPMDSLLYSKYNVLNEINPIKVNGKAIPVEVKQAIYTDLFENSKKKVTRKSIYIYLLKNGYIEKEDIVSGIDIEIKSKLKSHHDFTQIVQENKCTPEEIERIIKGILVYSDDKSMLRRWLKNNIKGLSENDVKYLAKLNYKEWGRLSKTLLTDIYTINPEDGEACSILDIMWNTNATLMEILSNEKYQFKQNIENYKAENYDEKQNLHEELDDMYISPAARRSIWQALRIVDEIVDIKKSAPKKIFIEMAREKKSAMKKKRTESRKDTLLELYKSCKSQADGFYDEELFEKLSNESNSRLRRDQLYLYYTQMGRSMYTGKRIDFDKLINDKNTYDIDHIYPRSKIKDDSITNRVLVEKDINGEKTDIYPISEDIRQKMQPFWKILKEKGLINEEKYKRLTRNYELTDEELSSFVARQLVETQQSTKALATLLKKEYPSAKIVYSKAGNVSEFRNRKDKELPKFREINDLHHAKDAYLNIVVGNVYDTKFTEKFFNNIRNENYSLKRVFDFSVPGAWDAKGSTFNTIKKYMAKNNPIIAFAPYEVKGELFDQQIVPKGKGQFPIKQGKDIEKYGGYNKLSSAFLFAVEYKGKKARERSLETVYIKDVELYLQDPIKYCESVLGLKEPQIIKPKILMGSLFSINNKKLVVTGRSGKQYVCHHIYQLSINDEDSQYLKNIAKYLQEEPDGNIERQNILNITSVNNIKLFDVLCTKFNSNTYEIILNSLKNDVNEGREKFSELDILEQCNILLQLLKAFKCNRESSNLEKLNNKKQAGVIVIPHLFTKCSVFKVIHQSITGLFEKEMDLLK

SEQ ID NO: 197 - protein, 738 aa, Treponema phagedenis
MLQELFAKEIAKIDEGFFRRLDESAFYLEDKSLKQKYSLFNDDNFTDKDYYKKFPTIHHLIKALINDETHVDIRLLYLACHTIIKNRGHFLFEGKEFNTESRFDDAINELFSYLRQDMEIDFAFEDKIADIKEILENKKIGMRDKQNALNKKLSIAPKDKQKKEIIKLIVGASFNLKTLFNDEKYSSEKESYSFAKSNYEEKEAVLESLLGDGFGLILRAKAVYDSSVLSEILGNETYLSFAKVKIYDKHKEDLAKLKKVIKTYHADEFKKVFAEANIQGNYCSYVGSCKKNGKKVPIEKRADKDAFYDFLKKILKDEKAKNSDADYAFILNEIELKTFLPKQVSKKNANIPYQLRRMELEKIVNNAEKYFSFLSEKDEYGTVKEKIIQLLTFKRPYYIGIIQDTHKEKFPDRCWVVKKENAKNEKITPWNFYDHIDEDKTAEAFITSRTNKCTYLIGEDVLPRNSLLYMEYTVLNELNNLKVSVDGVNIFDVKLKKKIYEQVFKQRKEVSKKTIADFLKKEGICKKENDVVITGIDEKCTTSLKLYIDIKKIIGKRIEEEPTKNALEDIILWASIYDEGEGRKILEAKIQSVYPDVFTQDELNKILKLKISGWGRFSRKFLESIVASFPGFTDTINIITAMRETNFNLMELLGDAYGFSKGIEKFNSKFNDDKKVFSYDKLVKDLYLSPSVKRMLWRALVIVKEVKSIMGKDPKKYLLKWQEEKKLKREGLPPAMQV

SEQ ID NO: 198 - protein, 1377 aa, Streptococcus equinus
MEKTYSIGLDIGTNSVGWAVITDDYKVPAKKMKVLGNTDKKYIKKNLLGALLFDSGETAEATRLKRAARRRYTRRKNRLRYLQEIFAKEMAKVDESFFQRLEESFLTDDDKTFDSHPIFGNKAEEDTYHQEFPTIYHLRKHLADSPEKVDLRLVYLALAHMIKFRGHFLIEGQLNAENTDVQKIFADFVGVYDRTFDDSHLSEITVDAASILTEKISKSRRLENLIKQYPTEKKNTLFGNLVALALGLQPNFKTNFKLSEDAKLQFSKDTYDEDLEELLGKIGDDYADLFTAAKNLYDAILLSGILTVDDNSTKAPLSASMIKRYEEHHEDLEKLKTFIKVNNFDKYHEIFKDKSKNGYAGYIENGVKQDIFYKHLKSIISEKNGGQYFLDKIEREDFLRKQRTFDNGSIPYQIHLQEMRTILRRQGEYYPFLKENQAKIEKILTFRIPYYVGPLARKNSRFAWAKYHSDEPITPWNFDEVVDKEKSAEKFITRMTLNDLYLPEEKVLPKHSYVYETFAVYNELTKIKYVNEQGKSFFFDANMKQEIFDHVFKENRKVTKAKLLSYLNNEFEEFRINDLIGLDKDSKSFNASLGTYHDLKKILDKSFLDDKTNEQIIEDIVLTLTLFEDRDMIHERLQKYSDIFTSQQLKKLERRHYTGWGRLSYKLINGIRNKENNKTILDFLIDDGDANRNFMQLINDDSLSFKTTIQEAQVVGDVDDIEAVVHDLPGSPAIKKGILQSVKIVDELVKVMGHNPQNIVIEMARENQITGYGRNRSNQRLKRLQDSLKEFGSDILSKKKPSYVDSKVENSHLQNDRLFLYYIQNGKDMYTGEELDIDHLSDYDIDHIIPQAFIKDNSIDNRVLTSSAKNRGKSDDVPSIEIVRNRKSYWYKLYKSGLISKRKFDNLTKAERGGLTETDKAGFIKRQLVETRQITKHVAQILDARFNTKCDENDKVIRDVKVITLKSSLVSQFRKEFKFYKVREINDYHHAHDAYLNAVVGTALLKKYPKLAPEFVYGEYKKYDVRKLVAKSSDNHSELGKATAKYFFYSNLMNFFKTEVKYADGRVFERPDIETNADGEVVWNKQRDFNIVRKVLSYPQVNIVKKVEVQTGGFSKESILPKGDSDKLIPRKTKKLQWETQKYGGFDSPTVAYSVLVVADVEKGKTRKLKTVKELVGISIMERSSFEENPVSFLEKKGYHNVQEDKLIKLPKYSLFEFEGGRRRLLASATELQKGNEVVLPQYMVNLLYHSQHVNNSHKPEHLNYVKQHKDEFKDIFNLIISIARINILKPKVVDNLINEFTEYGQEDISSLSESFINLLKFISFGAPGAFKFLKLDVKQSNLRYKSTTEALSATLIHQSVTGLYETRIDLSKLGEE

SEQ ID NO: 199 - protein, 1128 aa, Streptococcus vestibularis
MSDLVLGLDIGIGSVGVGILNKVTGEIIHKNSRIFPAAQAENNVERRTNRQGRRLTRRKKHRRVRLNHLFEESGLITDFTKVSINLNPYQLRVKGLIDELSNEELFIALKNMVKHRGISYLDDASDDGNSSVGDYAQIVKENSKQLETKTPGQIQLERYQKYGQLRGDFTVEEDGKKHRLINVFPTSAYRSEALRILQTQKEFNPQITDEFINRYLEILTGKRKYYHGPGNEKSRTDYGRYTTKKDSENEYITLDNIFGILIGKCTFYPEEYRAAKASYTAQEFNLLNDLNNLTVPTETKKLSEEQKNQIINYVKNEKAMGPAKLFKYIAKLLSCDVADIKGYRIDKSDKAEIHTFEAYRKMKTLETIDFEKMSRDQLDKLAYVLTLNTEREGIQEALDHEFADGNFSQEQIDELVQFRKANSSIFGKGWHNFSVKLMMELIPELYATSEEQMTILTRLGKQKTTSSSNKTKYIDEKLLTEEIYNPVVAKSVRQAIKIVNAAIKEYGDFDNIVIEMARETNEDDEKKAIQKIQKANKDEKDAAMLKAANQYNGRAELPHSVFHGHKQLATKIRLWHQQGERCLYTGKTISIHDLINNPNQFEIDHILPLSITFDDSLANKVLVYATANQEKGQRTPYQALDSMDDAWSFRELKAFVRESKSLSNKKKEYLLTEEDISRFDVRKKFIERNLVDTRYASRVVLNALQEHFRAHKTDTKVSVVRGQFTSQLRRHWGIEKTRDTYHHHAVDALIIAASSQLNLWKKQKNTLVNYSENQLLDIETGELISDDEYKESVFKAPYQHFVDTLKSKEFEDSILFSYQVDSKFNRKISDATIYATRQAKVGKDKKDETYVLGKIKDIYSQTGYDAFIKIYQKDKSKFLMYRHDPQTFEKVIEPILENYPNKEMNEKGKEVPCNPFLKYKEEHGDYIRKYSKKGNGPEIKSLKYYDSKLGNHIDITPKDSNNKVVLQSVSPWRADVYFNKTTGKYEILGLKYADLQFEKGTGTYKISQEKYNVIKKKEGVDSDSEFKFTLYKNDLLLIKDTETKEQQLFRFLSRTKPNVKHYVELKPYDKQKFEGNESLINVLGAVAKGGQCQKGINKPNISIYKVRTDVLGNQHIIKNEGDKPKLDF

SEQ ID NO: 200 - protein, 1080 aa, Methylocystis sp.
MRVLGLDGGIASIGWALIEIFEDHEPSDGRIIDTGAWMFDAPEEKSQTGTKLKSELRRIFRGQRRVIRRRRQRMNEVRRILHRHGLLSSDNRDALKQPGLDPWKIRAEGIDRLLSPIEFAVALGHIARHRGFKSNSKGAKTSDLDAESSRMKKAVGETREKLARFGSPAKLLVEDEGFVLRQTKLKSGALETVRRFRNRDGDYSRSLLRDDLAAEVRALFRAQARLQSTFAKVELEAEFTQAAFFQRPLQDSERLVGPCPFEPAEKRSPKRGYSFELFRFLSRLNHLTLREGSEERTLTVEELRTAAADFGGVAKFTFSTLRKRLALPDIAIFVGIKADDEKKLDVVARSGEAATGTARLRRVVIDALGELAWGALISAPERLDKITEIITFRSDLDRIRAGLIEAGFDTPLIEAIVRAAADGKLDAFTGVGHISAKAARNIIPGLMRGMTYDKACAAAGYDHTASRERDAFDVGMHGKEALKKILQEERISRELVGSPSARKALIEAVKQVKAIIEKYGVPDRIHVELARDVGKSIEERRDIHFGIEKRSRQKDKLRELFGKEVGHLPQDGERGKEELLRFELWNEQMGRCLYTDEYINPKQLVASDNSVQVDHILPWSRFGDDSYLNKTLCTAKANQDKKGRTPYEWFRADKPEAEWDAFVARVESIQFMKGLKKRNYKLKNAEEAAEKFRSRNLNDTRWTCRLLAEALKQLYPKGEKDKDGKERRRVFTRPGALTNRLRRAWSLQRRKKSEKGERIADDRHHALDAIIVAATTESLLIRATREVQDIERKGLHYDLTKNITQPWPGFADEALDAVEKVFVARAERRRARGKAHDATIRHIAVRDDEAKVYERKKVGDIKLGDLIRVKDAERNAPLIENLRKWIEAGSPRDNPPLSPKGDPVSKVRLVTKNKVNITLDTGNPERLATVDRGEMARVDVFRKANRKGKYEYYLVPIYPHEIATMETPPMRAVQGGGDDDKWPEIDSTFEFLWSINQLSLLELTKPDGEVIRSYFRSLDRNTGALTVSGIANSTATRKGIGTRTLIDFKKLHVDRLGQIFEVERELRTWRGETWRGKDCI

SEQ ID NO: 201 - protein, 1087 aa, Phascolarctobacterium succinatutens
MLRMKYAIGLDIGIASVGYAVLALDHEENPWGIIRLGSRIFDVAENPKDGASLALPRREARSVRRRLRRHHHRLERIKNLLINTEFITKDELLHLYDGNLSDVYELRVKALDYSVTNAELTRILLHLAQRRGFKSNRKSDANDKEAGQLLEAVSANAKRMQENHYRTVGEMFYKDDLFSKYKRNKGGTYLTTVHRDMIAAEARTILEKQFALGNNICTQDFIDKYLSILLSQRQFDEGPGEPSPYAGNQIANMIGKCTFEPNEYRAAKASYSFERFNLLQKVNHLRLLLEGKSIALDNEQRKKIIALAHDKADLRYSHIRKALGLDEKVLFNTITYNDDVSVIEKKTKFNFLQAYHQIKKVLAEDMQKLTTEQLDNIGQILSTYKSDNKRTEELSALGLEKKIIDALLGINGLSKFAHLSLKALRKINPYLEEGKIYNEACTAAGYDFKAHANTQKTELLPAYKEEMDDITSPVARRAIAQSIKVINAIIREQKGSPLYINIELAREMAKGFDERTQIDKANKENQAKNERIMERIRTEFHKANPTGMDLIKLKLWEEQDGRSPYSQKAISINRLFEPGYVDIDHIVPYSISFDDSFKNKVLVFSDENRDKGNRLPIAYLQSKFGAKAAENFMIWVQSNIKDYKKRQKLLKREITEEDINKFKERNLQDTKTISRFLYNYINDYLLFAPSDTGKKKRVTAVNGTITAYLRKRWGINKIRANGDKHHAVDAVVIACTTDKMIKDLSSFSRYHELEYTHTDTESFLVNSLTGEILKRFPYPWEDFRPELMARLSDNPADALRKLNLIFYHGIDLSTIKPIFVSRMPRHKVTGAAHKATIKSARCLDNGIVICKTSLQNLKLDKEGEIANYYAPESDTILYNALKERLRSYDNKPAKAFAEPFYKPKADGTPGPLVKKVKVYEKSTLNVAVQQNTAVADNDSMVRVDVFHVKGNGYYLVPIYIADTLKKELPNKAIVAYKPYADWPVMDDSNFIFSLYPNDLIKFEHKNSVKFAKVNKESTLNDFYSTKSEIVYFKGCNINTGAITIINHENTYVVSSLGVKTLPSLEKYQADVLGNYTKVKKEVRKPFR

SEQ ID NO: 202 - protein, 1375 aa, Lactobacillus ruminis
MRKNQEPYNIGLDIGTSSIGWSIMNDNFDLMRVKGKKGIGVRLYNEGQSAAERRMHRTARRRYGRRKWRLRLLEDFFDEHMAEVDDTFFARLKDSNISPKDDKKYRKSLLFPKSKGVTYQDDGEFYKKYPTMYHLRYALMTEHRKFDLREIYLAFHHMVKYRGNFLYDTSVDSFEAKNLDIKGKFDEINDLLSSYTDFYVDNSNAALVESILLEKNTTRKDKSKKIAKLLHVEDKEKGKNKKAKDLATQISNAVLGLKCNFHLIFELQQKYSFDLCSEKTEENIAKLSEVLDENQKMLLMILKEVQDQVMLNAFVPSGMSLSEAMMQKYDDYGEQLKIYHELEHSVSDDSAAKLRGAYRDYNDNIIKRIDGDNKKDTFYKRVKNILTKISKEYVDQDVLESCGKLKKLIDENKLFIRQRTAANGVLPHQLHQIEMRKIIDNQKEYYPWLAEPNPNEKRRVYSKYKVEELIAFRIPYYVGPLVDPNNADKNKEARFSWMVRKKDGEITPWNFYDKVDWAESANNFIERMKSKDTYLLGEDVVPKESMLYQKYEVLNELNNLRINDSGLSDSFEDVKLKQAIYNDLFKKQKIVKITDLQNYLVQNHKYLVKPKISGLADENRFLSSLSTYSDLKTIFGDKVDDRTYFNDFEKMVEYSTVFEDGHDYNQKLDEYTWLTKEEKYKIGKKRYRGWGKLSKKLLTGLRDKNNHTIMDNLWETNRNFMQIQTADEFSKQIAEENERHLKGSVSDAINDMYTSPANKKAIRQVLRVVDDIQKAMGYAPSSISLEFAREDGPSVRTVSRANRMKSIYEKYASEVSEEVMKDLDGVIKDKKGLNDRLYLYFEQQGKDMYSGHPLDFDKVISGQEYDIDHILPQAVIKDDSLDNRVLTTKALNNDVKSKGVPCRMFNGMHSFWKNLYDKGFISRRKFNNLTTNPENIDKYKMKGFVNRQLVETRQIIKLVANVLNDKYQNDDVDIIEVRAELTHDVRKHFKFYKNRNVNDYHHAFDAYLTSFIGHYLFKKYPNLRPLFDYNDFMKVSDNVFKQLRGNNFLGEFLNKTGDIISTDGNFVLNKEEMINKLNKAYAFKKILVTKEVGQRTGAMFNETRYPAPNSRKAALKYRRMPKPDSLISVKDYKNTDIYGGYSGKNDAYMVIVDMGKQYMVVGVPVRYTEKLDKLRIKHSELYRDELRKVLSRDKTLLDSKGNVKRFDIVLDRVLYGQLIEDGNELFTLGSSKYKRNFRQLFLDKQCIEILDSSATPQPTDEELIWVYDQILDKVDKYFELYDINRQRETLRKGRAAFCSLPNISMKKDDVTKKKILNEILVALHANESESNCEKIGKKVFGRLQVPGGIKLSKEAKLIYQSPTGLFERVVYLKDL

SEQ ID NO: 203 - protein, 1391 aa, Prevotella oralis
MKKILGLDLGTTSIGWALVNEKENNEELSSIIRLGVRVNPLTVDEKSNFEKGKDITTNADRTKCRSARRNLQRFKLRREALADCLKRHGLMTDETPLCETNNSIIFKTYSNRAKAVCEKIALDDFVRVLFMINKKRGYKSSRKLNTDDEGTLVDGMDVAKLLYNEQITPGEYLLRLFKKGKKTRPDFYLSDLKAELERIWDFQRTFYPEILCNALKEDLKGKSRTQSSAIFYAKYKVSTAKIAGKDKRLQELTWRTDALRKQLTIDEVAYVICSINGEVNGSSQRLSMISDRSKLLYFNHQTIGQYLMQRLEENPNAGLKNIIFYRQDYEDEFNDIWNSQATYHKELTPELKKEVKDIIFYQRGLKSCKWLINYCELEHEEIEVKTPEGKLRKITIGSKTCPKSSPLFQEFKIWQVLNNLQVSPLNSRRKAKRKKDEEPSLFSDEDMNTACRYLNEEEKLTLFKELSIKKELKKKDALKLLFENYKELDLNYKVISGNVTMANLYRAFQDIISLTGNGEFDFQAMPAEEAEKTVEEIFGGLGYKTAFLHFDASLHDKEFERQPAYRLWHLLYSYAGDQSKTGIEALVKRIQELCGFEPEYARILANISFIPDYGNLSSKAMRKILPYMQDGYEYSEACSKAGYRHSASSLTKEEINKKNYKTHLDEIKRNSLRNPIVEKILNQMVNVVNSVIDTYSNIDEIRIEMARELKKSKPEREDMSFAISKATKETERIKGILEQEFKIQHVTRNDIIRYRLYEELKPNGYKTLYSNTYIPREDLFSKKFDIEHIIPKARLFDDSYSNKTLELRDINIEKGNQTAYDFVLSKYGEEGLYKYEQRVEEFKKNNEQAGTKCRKLLMREADIPSDFLNRDLNDSQYIAKKAHELLREIVPTVTATTGSITNRLREDWKLVNVMKELNWEKYDKLGLTEEYKDKDGNTVRHIKDWTKRNDHRHHAMDALTIAFTKPSFIQYLNNLNARSNRGGSIYGIEQKELERENNKLVFIPPIDPKIFRKQAKEHLSNILISIKAKNKVVTKNVNKTKSKSGTNRKVQLTPRGQLHLETVYGKIRTYKTEEIKVGTKLTEELIAKVADKKIREALMQRLSEYGGNIKKAFQNISKHPIWLNGSHTKHVPEKVKIVFFEDVFTIRKAITPDIKIDKVIDSKIRRILQERLNEFGGEASKAFSNLDENPIWFNRDKGIAIKSVKIRGIAKGTAIRVKKDIHGKTIIGNNGYPVANDYVNTGNNHHVAIFRDKDGNLQEHIVSFYEATARAIQNLPIVDRNYNSEKDWKFLFSMKQNEYFVFPNPNTGFNPSEISLKDEKNYALISPNLFRVQKLSHYYYVFRHHLETNVDTNLQLKDITWKRITAVNNLTGAVKVRIDHLGRIVDVGEYK

SEQ ID NO: 204 - protein, 1167 aa, Streptococcus sanguinis
MLFGLKTKFKDCFELEEEPDLNFSKENYDDNLEKLLGELGEDFSDVFDKLKILRDTILLSGMLTYTGATHARFSATMVERYEEHRKDLQRFKSFIKQNLSEQDYLDIFGRKTQNGFDVDKETKGYVGYITNKMVLTNPQKQKTIQQNFYDYISGKITGIEGSEYFLNKISDRTFLRKLRTSDNGAIPNQIHAYELEKIIERQGKDYPFLLENKDKLLSILTFKIPYYVGPLAKGNNSRFAWIKRANSSDILDDNDEDTRNGKIRPWNYHKLINMDETRDAFITNLIGNDTILLNEKVLPKRSLIYEEVMLQNELTRVKYKDKYGKAHFFDSEHRQNIINGLFKINSKRVNAERLIKYLSDNHKDLNAIEIVSGVEKGKSFNSTLKTYNDFKTIFSEEFLDSEIYQKELEEIIKVITVFDDKKSIKNYLTKYFGHLEFLDEEKINQLSKLRYTGWGRYSAKLLLDIRDEDTGFNLLQFLRNDEENRNLTNLISDNTLSFDPKIKAIQSKSTVEDDVFDEIKKLAGSPAIKRGILNSIKIVDELVQIIGYPPQNIVIEMARENMTTEEGQKKTKTRKSKLESALKNIENSVLENGKVLHSDEQLQSEKLYLYYLQNGKDIYSLDETGSPAPIYLDQLDQYEVDHIIPYSFLPIDSIDNKVLTHRKNNQRKLDNIPDKETVAHMKPFWEALYNAKLISQTKYQRLTTSERTPDGVLTESMKAGFIERQLVETRQIIKHVARILDNRFSDTKIITLKSQLVTNFRNTFHIAKIRELNDYHHAHDAYLAVVVGQTLLKAYPKLAPELIYGHHVHFNRHEENKATLRKHLYSNIMRFFNNPDSKVSKDIWDCNRDLPIIKHVIYNSQINFVKRTMIKKGAFYNQNPVGKFNKQLAANNRYPLKTKALCLDTSIYGGYGPMNSTLSIIIIAERFNEKKGKIETVKEFHDIFIIDYEKFNNNPFQFLNDTSENGFLKKNNINRVLGFYRIPKYSLMQKIDGTRMLFESKLNLHKATQFKLTKTQNELFFHMKRLLTNSNLMDLKSESAIKESQNFILKHKEEFDNISNQLSAFSQKMLGNTTSLKNLIKGYNERKIKEIDIREETIKYFYDNFIKMFSFVKSGAPKDINDFFDNKYTVARMRPKPDKRLLNATLIHQSITGLYETRIDLSKLGED

SEQ ID NO: 205 - protein, 1334 aa, Staphylococcus pseudintermedius
MGRKPYILSLDIGTGSVGYACMDKGFNVLKYHDKDALGVYLFDGALTAQERRQFRTSRRRKNRRIKRLGLLQELLAPLVQNPNFYQFQRQFAWKNDNMDFKNKSLSEVLSFLGYESKKYPTIYHLQEALLLKDEKFDPELIYMALYHLVKYRGHFLFDHLKIENLTNNDNMHDFVELIETYENLNNIKLNLDYEKTKVIYEILKDNEMTKNDRAKRVKNMEKKLEQFSIMLLGLKFNEGKLFNHADNAEELKGANQSHTFADNYEENLTPFLTVEQSEFIERANKIYLSLTLQDILKGKKSMAMSKVAAYDKFRNELKQVKDIVYKADSTRTQFKKIFVSSKKSLKQYDATPNDQTFSSLCLFDQYLIRPKKQYSLLIKELKKIIPQDSELYFEAENDTLLKVLNTTDNASIPMQINLYEAETILRNQQKYHAEITDEMIEKVLSLIQFRIPYYVGPLVNDHTASKFGWMERKSNESIKPWNFDEVVDRSKSATQFIRRMTNKCSYLINEDVLPKNSLLYQEMEVLNELNATQIRLQTDPKNRKYRMMPQIKLFAVEHIFKKYKTVSHSKFLEIMLNSNHRENFMNHGEKLSIFGTQDDKKFASKLSSYQDMTKIFGDIEGKRAQIEEIIQWITIFEDKKILVQKLKECYPELTSKQINQLKKLNYSGWGRLSEKLLTHAYQGHSIIELLRHSDENFMEILTNDVYGFQNFIKEENQVQSNKIQHQDIANLTTSPALKKGIWSTIKLVRELTSIFGEPEKIIMEFATEDQQKGKKQKSRKQLWDDNIKKNKLKSVDEYKYIIDVANKLNNEQLQQEKLWLYLSQNGKCMYSGQSIDLDALLSPNATKHYEVDHIFPRSFIKDDSIDNKVLVIKKMNQTKGDQVPLQFIQQPYERIAYWKSLNKAGLISDSKLHKLMKPEFTAMDKEGFIQRQLVETRQISVHVRDFLKEEYPNTKVIPMKAKMVSEFRKKFDIPKIRQMNDAHHAIDAYLNGVVYHGAQLAYPNVDLFDFNFKWEKVREKWKALGEFNTKQKSRELFFFKKLEKMEVSQGERLISKIKLDMNHFKINYSRKLANIPQQFYNQTAVSPKTAELKYESNKSNEVVYKGLTPYQTYVVAIKSVNKKGKEKMEYQMIDHYVFDFYKFQNGNEKELALYLAQRENKDEVLDAQIVYSLNKGDLLYINNHPCYFVSRKEVINAKQFELTVEQQLSLYNVMNNKETNVEKLLIEYDFIAEKVINEYHHYLNSKLKEKRVRTFFSESNQTHEDFIKALDELFKVVTASATRSDKIGSRKNSMTHRAFLGKGKDVKIAYTSISGLKTTKPKSLFKLAESRNEL

SEQ ID NO: 206 - protein, 1156 aa, Ruminococcus albus
MGNYYLGLDVGIGSIGWAVINIEKKRIEDFNVRIFKSGEIQEKNRNSRASQQCRRSRGLRRLYRRKSHRKLRLKNYLSIIGLTTSEKIDYYYETADNNVIQLRNKGLSEKLTPEEIAACLIHICNNRGYKDFYEVNVEDIEDPDERNEYKEEHDSIVLISNLMNEGGYCTPAEMICNCREFDEPNSVYRKFHNSAASKNHYLITRHMLVKEVDLILENQSKYYGILDDKTIAKIKDIIFAQRDFEIGPGKNERFRRFTGYLDSIGKCQFFKDQERGSRFTVIADIYAFVNVLSQYTYTNNRGESVFDTSFANDLINSALKNGSMDKRELKAIAKSYHIDISDKNSDTSLTKCFKYIKVVKPLFEKYGYDWDKLIENYTDTDNNVLNRIGIVLSQAQTPKRRREKLKALNIGLDDGLINELTKLKLSGTANVSYKYMQGSIEAFCEGDLYGKYQAKFNKEIPDIDENAKPQKLPPFKNEDDCEFFKNPVVFRSINETRKLINAIIDKYGYPAAVNIETADELNKTFEDRAIDTKRNNDNQKENDRIVKEIIECIKCDEVHARHLIEKYKLWEAQEGKCLYSGETITKEDMLRDKDKLFEVDHIVPYSLILDNTINNKALVYAEENQKKGQRTPLMYMNEAQAADYRVRVNTMFKSKKCSKKKYQYLMLPDLNDQELLGGWRSRNLNDTRYICKYLVNYLRKNLRFDRSYESSDEDDLKIRDHYRVFPVKSRFTSMFRRWWLNEKTWGRYDKAELKKLTYLDHAADAIIIANCRPEYVVLAGEKLKLNKMYHQAGKRITPEYEQSKKACIDNLYKLFRMDRRTAEKLLSGHGRLTPIIPNLSEEVDKRLWDKNIYEQFWKDDKDKKSCEELYRENVASLYKGDPKFASSLSMPVISLKPDHKYRGTITGEEAIRVKEIDGKLIKLKRKSISEITAESINSIYTDDKILIDSLKTIFEQADYKDVGDYLKKTNQHFFTTSSGKRVNKVTVIEKVPSRWLRKEIDDNNFSLLNDSSYYCIELYKDSKGDNNLQGIAMSDIVHDRKTKKLYLKPDFNYPDDYYTHVMYIFPGDYLRIKSTSKKSGEQLKFEGYFISVKNVNENSFRFISDNKPCAKDKRVSITKKDIVIKLAVDLMGKVQGENNGKGISCGEPLSLLKEKN

SEQ ID NO: 207 - protein, 1440 aa, Weeksella virosa
MKTILGLDLGTNSIGWALVEQDFENKQGLILGMGSRIIPMDAGIIGKFAEGSSISQTAERTGYRSIRRLRERHLLRRERLHRVLNILKFLPEHYAAEIDFEKRFGQFLAETEPKLAWKKNAEGKFEFLFQRSFDEMVADFKANGQDIKIPYDWTIYYLRKKALTQKISPQELAWIILNFNQKRGYYQLRGEEEEENPNKKVEFYSLKIVDVVADEQPNKKGDTWYSLHLENGWVYRRSSKIPLYDWKDKVRDFIVTTDINEDGSEKLDKDGEVKRSFRAPKEDDWTLIKKKTEQEIEQFNQTVGSYIYEALLDNPTQKIRGKLVRTIERKFYKSELKKILEKQIELQPELFTEDLYNACARELYRRNVAHQQQLSSRDFVYLFLNDIIFYQRPLRSQKSLISNCSLEFRTIKDKDGNGQIIYLKAIPKSNPYYQEFRVWQWLYNLKIFTKEDDKDVTNQFINKVEDLEALFEFLMNQKEVNHTDILTYLIEPIVKSKYPNAKGKAFKDELKKELKKYRWNYVYDADKDESKSYPMNETRYELRKRLDKVENVPADFMTRKIEQHLWHIIYSVTDKIEFEKALKSFANKYDLHQESFVENFKRFKPFDSDYGTYSEKAIKKLLPLMRVGKYWSWDIIDDKTKTRIGKIITGEYDETIKNRVREKAIDLTEENHFQGLQLWLAQYIVYDRHSEADIAGKWNSVADLEQYLSEFKQHSLRNPIVEQVITETLRVVRDIWKQYGKGAKDYFDEIHIELGREMKNTAEERKRLSSIISENETTNLRIRAILEELMYDENMENVRPYSPMQQEALKIYEDGVLSSSVEIPEDIEKISKKSEPTKSEIQRYKLWLEQKYRSPYTGRPIPLSKLFTPAYQIEHIIPQARFFDDGFSNKVICESEVNALKDKMLGLEFIQNYYGQKVTTSFGEVTILTEDAYKAFVKEHYDKNRSKRNKLLLEEIPEKMIDRQMNDTRYISKYISKVLSNLVRGEKDDEGVNSKNIIPGNGKITGILKQDWGLNDVWNDLILPRFERMNQLTNSTDFTAWNEKHQKFLPSVPLELSKGFQKKRIDHRHHALDALIIACATRDHVNLLNNKHAKSRNERYDLQHKLRHTTPWQDKEGKVRTKFTEFKKPWETFTQDTKKELEKIVVNFKQNLRVINKATNYYEKIVDGKKVMFKQEGVNWAIRKPMHKETVSGKIDLPRVKVSKGKILTATRKSLDTSFNAKTILSITDTGIQKILLNYLKAKGNPELAFSPEGIEEMNQNISLYNDGKPHQPILKVRVFEQGSKFPLGETGNKTTKYVEAAKGTNLFFGVYEDNQGKRSYDTIPLNIVIERQKQGLNSVPETNEKGHRLLFSLSPNDLVYVPIEGEVFDETNPDVNRIYKVVSFSGSQMFCVRQDVATSIVYKLEFSSLNKMERTIDGIMIKEICIKLKVDRLGNISKA

SEQ ID NO: 208 - protein, 1179 aa, Sphaerochaeta globus
MSKKVSRRYEEQAQEICQRLGSRPYSIGLDLGVGSIGVAVAAYDPIKKQPSDLVFVSSRIFIPSTGAAERRQKRGQRNSLRHRANRLKFLWKLLAERNLMLSYSEQDVPDPARLRFEDAVVRANPYELRLKGLNEQLTLSELGYALYHIANHRGSSSVRTFLDEEKSSDDKKLEEQQAMTEQLAKEKGISTFIEVLTAFNTNGLIGYRNSESVKSKGVPVPTRDIISNEIDVLLQTQKQFYQEILSDEYCDRIVSAILFENEKIVPEAGCCPYFPDEKKLPRCHFLNEERRLWEAINNARIKMPMQEGAAKRYQSASFSDEQRHILFHIARSGTDITPKLVQKEFPALKTSIIVLQGKEKAIQKIAGFRFRRLEEKSFWKRLSEEQKDDFFSAWTNTPDDKRLSKYLMKHLLLTENEVVDALKTVSLIGDYGPIGKTATQLLMKHLEDGLTYTEALERGMETGEFQELSVWEQQSLLPYYGQILTGSTQALMGKYWHSAFKEKRDSEGFFKPNTNSDEEKYGRIANPVVHQTLNELRKLMNELITILGAKPQEITVELARELKVGAEKREDIIKQQTKQEKEAVLAYSKYCEPNNLDKRYIERFRLLEDQAFVCPYCLEHISVADIAAGRADVDHIFPRDDTADNSYGNKVVAHRQCNDIKGKRTPYAAFSNTSAWGPIMHYLDETPGMWRKRRKFETNEEEYAKYLQSKGFVSRFESDNSYIAKAAKEYLRCLFNPNNVTAVGSLKGMETSILRKAWNLQGIDDLLGSRHWSKDADTSPTMRKNRDDNRHHGLDAIVALYCSRSLVQMINTMSEQGKRAVEIEAMIPIPGYASEPNLSFEAQRELFRKKILEFMDLHAFVSMKTDNDANGALLKDTVYSILGADTQGEDLVFVVKKKIKDIGVKIGDYEEVASAIRGRITDKQPKWYPMEMKDKIEQLQSKNEAALQKYKESLVQAAAVLEESNRKLIESGKKPIQLSEKTISKKALELVGGYYYLISNNKRTKTFVVKEPSNEVKGFAFDTGSNLCLDFYHDAQGKLCGEIIRKIQAMNPSYKPAYMKQGYSLYVRLYQGDVCELRASDLTEAESNLAKTTHVRLPNAKPGRTFVIIITFTEMGSGYQIYFSNLAKSKKGQDTSFTLTTIKNYDVRKVQLSSAGLVRYVSPLLVDKIEKDEVALCGE

SEQ ID NO: 209 - protein, 1370 aa, Streptococcus gallolyticus
MTKKNYSIGLDIGTNSVGWAVITDDYKVPAKKMKVLGNTDKKYIKKNLLGALLFDSGETAEATRLKRTARRRYTRRKNRLRYLQEIFAEEMTKVDESFFYRLDESFLTTDEKDFERHPIFGNKAEEDAYHQKFPTIYHLRNYLADSSEKADLRLVYLALAHMIKYRGHFLIEGKLNAENTDVQKLFTDFVGVYDRTFDDSHLSEITVDVASTLTEKISKSRRLENLIKYYPTEKKNTLFGNLIALALGLQPNFKMNFKLSEDAKLQFSKDTYEEDLEELLGKIGDDYADLFTSAKNLYDAILLSGILTVDDNSTKAPLSASMIKRYVEHHEDLEKLKEFIKANKSELYHDIFKDKNKNGYAGYIENGVKQDEFYKYLKNTLSKIDGSDYFLDKIEREDFLRKQRTFDNGSIPHQIHLQEMHAILRRQGDYYPFLKEKQDRIEKILTFRIPYYVGPLVRKDSRFAWAEYRSDEKITPWNFDKVIDKEKSAEKFITRMTLNDLYLPEEKVLPKHSHVYETYAVYNELTKIKYVNEQGKESFFDSNMKQEIFDHVFKENRKVTKEKLLNYLNKEFPEYRIKDLIGLDKENKSFNASLGTYHDLKKILDKAFLDDKVNEEVIEDIIKTLTLFEDKDMIHERLQKYSDIFTANQLKKLERRHYTGWGRLSYKLINGIRNKENNKTILDYLIDDGSANRNFMQLINDDTLPFKQIIQKSQVVGDVDDIEAVVHDLPGSPAIKKGILQSVKIVDELVKVMGDNPDNIVIEMARENQTTNRGRSQSQQRLKKLQSSLKELGSNILNEEKPSYIEDKVENSHLQNDQLFLYYIQNGKDMYTGDELDIDHLSDYDIDHIIPQAFIKDDSIDNRVLTSSAKNRGKSDDVPSLDIVRARKAEWVRLYKSGLISKRKFDNLTKAERGGLTEADKAGFIKRQLVETRQITKHVAQILDARFNTEHDENDKVIRDVKVITLKSNLVSQFRKDFEFYKVREINDYHHAHDAYLNAVVGTALLKKYPKLASEFVYGEYKKYDIRKFITNSSDKATAKYFFYSNLMNFFKTKVKYADGTVFERPIIETNADGEIAWNKQIDFEKVRKVLSYPQVNIVKKVETQTGGFSKESILPKGDSDKLIPRKTKKVYWDTKKYGGFDSPTVAYSVFVVADVEKGKAKKLKTVKELVGISIMERSFFEENPVEFLENKGYHNIREDKLIKLPKYSLFEFEGGRRRLLASASELQKGNEMVLPGYLVELLYHAHRADNFNSTEYLNYVSEHKKEFEKVLSCVEDFANLYVDVEKNLSKIRAVADSMDNFSIEEISNSFINLLTLTALGAPADFNFLGEKIPRKRYTSTKECLTATLIHQSITGLYETRIDLSKLGEE

SEQ ID NO: 210 - protein, 1044 aa, Nitrosomonas sp.
MLHKMRYRLALDLGSTSLGWAMVRLNANQQPCAVIKAGVRIFSNGRNPKDGSSLAVTRREARSMRRRRDRLLKRKARMMRTLIEYGFFPANETQRKALENLNPYALRAKGLDEALTPSEFARALFHINQRRGFKSNRKTDKKDSDSGALKTAIKQLHSVLDPQGNDGKPRTVGELLYKRFTDLSKLPKDRTVRARYRQDKIVKDDGKTKIDKYYDLYIDRAMIEQEFDALWKKQSELNPILFTENARADLKDVLLYQRSLKPVKPGRCTFMSEEERAPLALPSTQRFRMYQEVNNLRILREGLKEESLTLQQRDDLINALEKNNRRTFTQIKKLLGVGGSVQFNFEDPKREELKGNTTSAILGKSEHFGEAWFAFNEAKQDAIVLQLIKEENEAKLVRWLQDETGIDEKRAEVIANAGLPEGYGSLCIEALARILPELRRDVVTYDKAVQAAGFEHHSKLNRNEEIPDITFKIESIDRNSGEIKQFHLHKELPYYGEYLQRHVGFGSGKPEDSIEKRYGKIANPTVHIGLNQVRVVVNALIKRYGHPSEIIVEVARDLKQSKDRRDEENKRQAENQKRNERLRKDIADILGISEERVRRDDIEKMILWEELSFDPADRRCPYSGVQVSTVMLLSDEVEVEHILPFSQTLDDSLNNKTVALRQANRIKGNRTPWEAFGTSNISGFDYSGILTRAELMPKAKRYRFAEDGYQRWLKDDAGFLARALNDTRHLSKIAREYMSLICPNTRVIPGQMTAMLRRNFGLNDVLGLNGEKNRNDHRHHAVDACVIAVTDQGLLQRFAAASASARERQLNRLVENMPLPWESYREHVRRAIDGIWVSHRPDHSHEGAMHNDTAYGLRGNGRVSFHKMVEGKREYIEDNLKVIEITDTKAIDRHGLLPTGKPRPYKGYKGDSNYCIEIVRNEKGRWEGEIISTFDAYQLVRKYGIVQLRYPVLSVSGKPLVMRLIRNDFVRLEHEGITRTLRVCKMREDGQVALADVTEANVDARTRTKEICYVFKTGGSLQKAKARRITISPIGELRDPGFKE

SEQ ID NO: 211 - protein, 1045 aa, Acidovorax avenae
MQKEKPLAYRLALDLGSTSLGWAVLRLSAPGEPSAVIRAGSRIFSDGRNPKDGSSLAVTRRAARAMRRRRDRLLKRKARMLAALERHGFFPQDEAARKALEKLNPYGLRARGLESALKPEEFGRALFHLNQRRGFQSNRKTDRKDSDSGALKQAIGTLRAQMHESGCRTVGEWFWKVRMERKPEGVKGQGVRARYRETPFTTDEGKKRIDKRYDLYVDRAMVAQEFDALWAAQATFAPALFNEAARAELRDILLHQRKLRPVQPGRCTLVPEEPRALLALPSTQRFRIYQEVNHLRVLHDELREEALTLAQRDQIVALLERQAKVTFTAMRKALGFSALFNLEDAKRDGLKGNATTAALGKKDLFGPLWAGFDTALQDEIVTQLMTEESEPRLIAWLQEHTGVDEARAQAIANAGLPEGYGSLGRTALARIVPELQRDVITYDKAVQAAGFAHHSDLGFSFEHDADEVERIGERTIASTGEIKPVFAFKQLPYYGRALQRHVAFAKENPRNDEERYGKIANPTVHIGLNQVRVVVNALMCRYGRPTEVVIELARDLKQSREQKLEAQQRQADNQKRNARIRRSIAEVLGISEERVRTLDIQKWILWEELSHDAADRRCPYSGVQISASMLLGERVEIEHILPFSMTLDDSLNNRTVALREANRIKRNRTPWDARTDFEAHGWSYDGILQRAERMPQRKRHRFAPDGYERWLGEDKDFLARALNDTRYLSRVAAEYLRLVCPGSATRVIPGQMTALLRGKFGLNDVLGLDGEKNRNDHRHHAVDACVIGVTDQRMMQRFAQANAQAREDGLTRLVEDMPLPWPTYRAHVERAVRHIWVSHKPDHGFEGAMMEETSYGILRDGTIKQRRKADGSAGREISRLIRITEPSQPQRHGVDAEGRPLPYKGYVGGSNYCLEITVNDKGKWEGQVISTFDAYRIVREGGLRQLRHSTQGQNGQALAMRLVIGDSVRLEVDEQERVMRIVKINGNNGQVFMAPVHEANVDARNSDKNEAFAYTSKIAGSFQKTKARQVTISPIGELRDPGFKG

SEQ ID NO: 212 - protein, 1218 aa, Prevotella denticola
MKASEEKLSKGLSTYMKENNLLTVGAAFAQLEDEGVRIRNNNNYRAIRSQFQHEIETIFMFQQGLSENELYERLVSEKKNIGTIFYKRPLRSQRGNVGKCTLERTKPRCAIGHPLFEKFRAWTLINNIKIRMSEEEQAEQLPMKLRFELYNDCFLAFVRAEFKFEDIRKYLEKRLGVHFSYNDKTINYKDSTSVAGCPITARFRKLLGEDWESFHVDGQKQRQAHGKNNASFHTVSYSTNDIWHFCYDAEEPEAVLSFAQDNLKWEKKKAEELVRIWSAIPQGYAMLSQKAIRNINKMLILGLKYSDAVLLAKVPEIVEITDGEILSVTEDYHRVEAQVGYEKQINNIVNALIAKYKSASEEYRFADHNYEYQLDKSDEKDIIKQIESNIGTRKWSLLDADEQTDILQKVRDKYQNFFRSHERKFVESPKLGECFEEYLMKKFPMVEGEQWKKLYHPSQIAIYRPVSAGKDRSALRLGNPDIGAIKNPTVLRVLNTLRKRVNQLLDDGLISPDETRVVVETARELNDANRKWALDNYNRIRHDENEKIKKILEEFYPKRDGISTDDIDKARYVIDQREMDYFTEEKPYNKDIKKYKLWLEQGGQCMYTGRTINLSNLFDPNSFDVEHTIPESISFDSSDMNLTLCDAHYNRFIKKNHIPADLPNYDKSVVIDGKEYSPIKPRLQRWADRVERLNRNVEYWRGQARRAQNKDRKDQCMREMHLWKMELEYWTKKLERFTITEVTDEFKNSQLVDTRVITRHAVLYLKSIFPHVDVQRGDVTAKFRKILGIQSVDEKKDRSLHSHHAIDATTLTIIPGAAKRERMLELFAKIEEVNKMLSFSGNEDRTGLKQELDGLKNQLNKEVKACRIGHNVSEIGTFINDNIIINHHVKNQALTPVRRRLRKRGHIVGGMDNPRWQTGDALRGEIHKASYYGAITQFAKDKDGKVLLKEGHPLVDPTIKFVIRRELKYKKSTADSGFASWDDLEKAIVDKELFALMKGQFPEETSFKDACEQGIYMIKKGKNGEVDTKLYRIRHIRCKTKQKNALKIKEQAYKSEKEYKRYFYAAVGDLYAMCCYTNGKTREFKIYSLYDISCHRKVGVEDIPEFITDKKGNRLMLDYKLHTGDMILLYKENPEELYDLDNVSLSKLLYKINGFENDGLRIRMVNHLVAKEAMGESVKDYAKLPDIIRCGVKTIKFLVMGENRDFVIKNGKISFNHR

SEQ ID NO: 213 - protein, 1458 aa, Fluviicola taffensis
MTKTILGLDLGTNSIGWALINQDFDNKKGEILGMGSRIIPMTQDIKDEFGKGNSISQTAERTRLRGVRRLIHRTLLRRERLHRVLNIIGFLPEHYANQIDFEKRFGKFKPESEPKISFDGNDVFLFEKSYQEMLVDFKIHQPQLVSNGKKIPHDWTIYYLRKKALSKKIEKEELAWILLNFNQKRGYYQLRGEEEEETPNKLVEFHSLKIVEVNADEPQKGKPEIWYSLVLENGWVYRRASKTPLFDWKDKIREFIVTTEINNDGTVKTDKEGTEKRSFRAPKPEDWTLQKKKTEFELSKSGNEVGAFIYESILQKPNQKIRGKLISTIERKFYKEELKTILKTQLFFHKELKDEKLYNACIEELYKNNEAHRSLLSNKGFEHLFINDILFYQRPLRSKKSQISNCPLEKRTYKKEGIEITEGIKVISKSNPIYQEFRLWQWISNLSLYCIEPTETNVTSTFLNSIEDYENLFEFLNNRKEIEQKHLLKYLLENQGFKGKLLTNELEKFRWNFVADKKYPCNETGSLLHTRLSKVKNISPDFLTKEIEHQLWHIIYSVTDKIEYEQALKTFARKNNLDVDSFFEHFKKIPPFESTYGAYSEKAIKKLLPLIRLGKYWNWEAIDSISKDRISKILSGEYDENIKNRVREKAVHLTSENNFQGLQEWLAKYIVYDRHSEGNDLGKWTSVSDLETYLKEFKQHSLRNPIVEQVITETLRVVKDIWIKHGKGTENFFDEIHVELGREMKNNSEDRKRLTNTITENENTNLRIKALLMEMMNDNDVENVRPYSPSQQEILKIYEDGALNSNIELDDEIVKISKKAEPTKSELQRYKLWLEQKYRSPYTGQVIPLNKLFTSEYEIEHVVPQSRFFDDSFSNKVICESAVNKRKDNQLGLQFIKNHSGEKVELGFGKVVQVFTEEQYLDFVKEHYSKNRSKHNKLLLEEIPEKMIERQLNDTRYISKFVSSILSNIVRSEKDDDGLNSKNILPGNGKITTELKRDWGLNDVWNDLILPRFERMNTITNSDLFTTYNDKYQKHLPTVPFEYSKGFQKKRIDHRHHAMDALVIACATRDHLNLMNNQSAKSELKRYDLQNKLRKKEPYFNQKENKQKEAFKDFIKPWGTFTEDSKNALEKIIISFKQNLRVINKATNSYESYKDEDGNLRIGKDGKPEKGLIKQKGLNWAIRKPLHKDTVSGQINLSRIKLPNGKILTATRKNLDTSFDLKTIENSITDTGIQKILKNYLLSKESPELAFSPEGLEEMNNEIEKYNNGKFHHPINKARIYELGSKFNVGQTGNRRDKFVEAAKGTNLFFAIYQDENKNRSYETIPLNEVIEHQKWRASLPKEEQEKIPLVPVNKLKGTFIFSLSPNDLVYVPSNDELERSASIDFSKLKKEQINRLYKMVSSSGSQCFFVKSEVATSVVNKMEYSSLNKMEKSIDNLMVKEICIKLKIDRLGNISKA

SEQ ID NO: 214 - protein, 1384 aa, Coriobacterium glomerans
MKLRGIEDDYSIGLDMGTSSVGWAVTDERGTLAHFKRKPTWGSRLFREAQTAAVARMPRGQRRRYVRRRWRLDLLQKLFEQQMEQADPDFFIRLRQSRLLRDDRAEEHADYRWPLFNDCKFTERDYYQRFPTIYHVRSWLMETDEQADIRLIYLALHNIVKHRGNFLREGQSLSAKSARPDEALNHLRETLRVWSSERGFECSIADNGSILAMLTHPDLSPSDRRKKIAPLFDVKSDDAAADKKLGIALAGAVIGLKTEFKNIFGDFPCEDSSIYLSNDEAVDAVRSACPDDCAELFDRLCEVYSAYVLQGLLSYAPGQTISANMVEKYRRYGEDLALLKKLVKIYAPDQYRMFFSGATYPGTGIYDAAQARGYTKYNLGPKKSEYKPSESMQYDDFRKAVEKLFAKTDARADERYRMMMDRFDKQQFLRRLKTSDNGSIYHQLHLEELKAIVENQGRFYPFLKRDADKLVSLVSFRIPYYVGPLSTRNARTDQHGENRFAWSERKPGMQDEPIFPWNWESIIDRSKSAEKFILRMTGMCTYLQQEPVLPKSSLLYEEFCVLNELNGAHWSIDGDDEHRFDAADREGIIEELFRRKRTVSYGDVAGWMERERNQIGAHVCGGQGEKGFESKLGSYIFFCKDVFKVERLEQSDYPMIERIILWNTLFEDRKILSQRLKEEYGSRLSAEQIKTICKKRFTGWGRLSEKFLTGITVQVDEDSVSIMDVLREGCPVSGKRGRAMVMMEILRDEELGFQKKVDDFNRAFFAENAQALGVNELPGSPAVRRSLNQSIRIVDEIASIAGKAPANIFIEVTRDEDPKKKGRRTKRRYNDLKDALEAFKKEDPELWRELCETAPNDMDERLSLYFMQRGKCLYSGRAIDIHQLSNAGIYEVDHIIPRTYVKDDSLENKALVYREENQRKTDMLLIDPEIRRRMSGYWRMLHEAKLIGDKKFRNLLRSRIDDKALKGFIARQLVETGQMVKLVRSLLEARYPETNIISVKASISHDLRTAAELVKCREANDFHHAHDAFLACRVGLFIQKRHPCVYENPIGLSQVVRNYVRQQADIFKRCRTIPGSSGFIVNSFMTSGFDKETGEIFKDDWDAEAEVEGIRRSLNFRQCFISRMPFEDHGVFWDATIYSPRAKKTAALPLKQGLNPSRYGSFSREQFAYFFIYKARNPRKEQTLFEFAQVPVRLSAQIRQDENALERYARELAKDQGLEFIRIERSKILKNQLIEIDGDRLCITGKEEVRNACELAFAQDEMRVIRMLVSEKPVSRECVISLFNRILLHGDQASRRLSKQLKLALLSEAFSEASDNVQRNVVLGLIAIFNGSTNMVNLSDIGGSKFAGNVRIKYKKELASPKVNVHLIDQSVTGMFERRTKIGL

SEQ ID NO: 215 - protein, 1077 aa, Neisseria bacilliformis
MQQKPQRYILGLDLGIASVGWACVWADENEHPTGLLDCGVRTFERAEVPKTGDSLALARRQARSVRRLIRRRAHRLLRLRRLLKREGVLLSADFNENGLVRGLPIDAWALRVAGLDRKLSNKEWAAVLLHLVKHRGYLSQRKNETQSKDKELGRLLAGVNGNREALQNRSDEYRTAAELAVKKFAAENNGSLRNKGGDYSHTFDRKDLQRELHLLFERQRALDNPFTSSEMEAAVDELLMKQRSALQGEAVLKMLGRCTFEPSEYKAAKNTYSAERFVWLTKLNNLRIQYNGEERALSEAERRLLLDEPYQKAKLTYKQVRTILELPESAVFKGLRYGHGEDGLKAESGTLMEMKAYHAVRKALKDAGLEGEWENRIRNPELLDAIGTAFSLYKTDEDIRANLAAFRLSENVLEALLAGLNFDKFVHLSLKALAKILPLMEQGMRYDEACKEAYGDHYGAKEQEDHRLLPPFVADDIRNPVVFRTLTQARKIVNEIVRRYGSPLRVHIETGREVGKSFSDRKEIEKRQEENRKERERAAAHFKELFPNFAGEPKAQDILKLRLYEQQHGKCLYSGKEIDLRRLPEKGYVEIDHALPFSRTWDDSFNNKVLVLGKENQDKRNRTPYEYLDGKGNSGAWRAFAERVSGCRFPYAKKQRLLTQKLDEKTEQGFLERNLNDTRYVARFLCQFIEEKMHLEGAGKKRVFASNGQITALLRGFWGLKKVREENDRHHALDAVVVACSSVSMQQKITRHFRYREELEHIDRETGEVIHGFPQPWEFFRQEVMTRVFSDDPVSELAEKLDSRPEAVHEFVTPLFVSRAPHRKVTGQGHLETIRSAKRLDEKISVVKLPLTQLKTKDIERIVGYPNREPALYDALAARLAAFKDDPAKAFSEPFYKTGKDGKCGVLVKAVRVENVQKSGLLVRKDESGKMQGVADNATMVRVDVFGKNGKNYLVPVYAWQVEKGELPNRAVVAYADEEDWDEMDDSFEFKFSLYPNDLVEVVTKKDKFFGYYSGFNRATGAINIKEHDLSKSKVKNGVYEGIGVKTAQSFQKYQVDTLGKTIRLCKPEKRMGFKKK

SEQ ID NO: 216 - protein, 1029 aa, Alicycliphilus denitrificans; identical to SEQ ID NO: 193

SEQ ID NO: 217 - protein, 1122 aa, Streptococcus suis; identical to SEQ ID NO: 87

SEQ ID NO: 218 - protein, 1428 aa, Parasutterella excrementihominis
MGKTHIIGVGLDLGGTYTGTFITSHPSDEAEHRDHSSAFTVVNSEKLSFSSKSRTAVRHRVRSYKGFDLRRRLLLLVAEYQLLQKKQTLAPEERENLRIALSGYLKRRGYARTEAETDTSVLESLDPSVFSSAPSFTNFFNDSEPLNIQWEAIANSPETTKALNKELSGQKEADFKKYIKTSFPEYSAKEILANYVEGRRAILDASKYIANLQSLGHKHRSKYLSDILQDMKRDSRITRLSEAFGSTDNLWRIIGNISNLQERAVRWYFNDAKFEQGQEQLDAVKLKNVLVRALKYLRSDDKEWSASQKQIIQSLEQSGDVLDVLAGLDPDRTIPPYEDQNNRRPPEDQTLYLNPKALSSEYGEKWKSWANKFAGAYPLLTEDLTEILKNTDRKSRIKIRSDVLPDSDYRLAYILQRAFDRSIALDECSIRRTAEDFENGVVIKNEKLEDVLSGHQLEEFLEFANRYYQETAKAKNGLWFPENALLERADLHPPMKNKILNVIVGQALGVSPAEGTDFIEEIWNSKVKGRSTVRSICNAIENERKTYGPYFSEDYKFVKTALKEGKTEKELSKKFAAVIKVLKMVSEVVPFIGKELRLSDEAQSKFDNLYSLAQLYNLIETERNGFSKVSLAAHLENAWRMTMTDGSAQCCRLPADCVRPFDGFIRKAIDRNSWEVAKRIAEEVKKSVDFTNGTVKIPVAIEANSFNFTASLTDLKYIQLKEQKLKKKLEDIQRNEENQEKRWLSKEERIRADSHGICAYTGRPLDDVGEIDHIIPRSLTLKKSESIYNSEVNLIFVSAQGNQEKKNNIYLLSNLAKNYLAAVFGTSDLSQITNEIESTVLQLKAAGRLGYFDLLSEKERACARHALFLNSDSEARRAVIDVLGSRRKASVNGTQAWFVRSIFSKVRQALAAWTQETGNELIFDAISVPAADSSEMRKRFAEYRPEFRKPKVQPVASHSIDAMCIYLAACSDPFKTKRMGSQLAIYEPINFDNLFTGSCQVIQNTPRNFSDKTNIANSPIFKETIYAERFLDIIVSRGEIFIGYPSNMPFEEKPNRISIGGKDPFSILSVLGAYLDKAPSSEKEKLTIYRVVKNKAFELFSKVAGSKFTAEEDKAAKILEALHFVTVKQDVAATVSDLIKSKKELSKDSIENLAKQKGCLKKVEYSSKEFKFKGSLIIPAAVEWGKVLWNVFKENTAEELKDENALRKALEAAWPSSFGTRNLHSKAKRVFSLPVVATQSGAVRIRRKTAFGDFVYQSQDTNNLYSSFPVKNGKLDWSSPIIHPALQNRNLTAYGYRFVDHDRSISMSEFREVYNKDDLMRIELAQGTSSRRYLRVEMPGEKFLAWFGENSISLGSSFKFSVSEVFDNKIYTENAEFTKFLPKPREDNKHNGTIFFELVGPRVIFNYIVGGAASSLKEIFSEAGKERS

SEQ ID NO: 219 - protein, 1371 aa, Lactobacillus buchneri
MKVNNYHIGLDIGTSSIGWVAIGEDGKPLRIKGKTAIGARLFQEGNPAADRRMFRTTRRRLSRRKWRLKLLEEIFDPYITPVDSTFFARLKQSNLSPKDSRKEFKGSMLFPDLTDMQYHKDYPTIYHLRHALMTQDEKFDIRMVYLAIHHIVKYRGNFLNSTPVDSFKASKVNFVDQFKKLNELYTAINPEESFQINLANSEDIGHQFLDPSIRKFDKKKQIPKIVPVSVDDKATDKINGKIASEIINAILGYKSKLDVVVQCTPVDSKSWALKFDEEDIDAKLQKILPEMDENQQSIIAILQNLYSQVTLNQIVPNGMSLSESMIEKYNDHHDHLKLYKKIIDQLADPKKKAALKKAYSQYVGDDGKVIEQADFWSSVKKNLDDSDLSKQIMDLIDAEKFMPKQRTSQNGVIPHQLHQRELDEIIEHQSKYYPWLAEINPNKHDLHLAKYKIEELVAFRVPYYVGPMITPDDQAKSAETVFSWMERKGKEAGQITPWNFDEKVDRNASANRFIKRMTTKDTYLIGEDVLPDESLLYEKFKVLNELNMVRVNGKLLKVADKQAIFQDLFENYKHISVKKLQNYIKSKTGLPSDPEISGLSDPEYFNNSLGTYNDFKKLFGNKVDEPDLQDDFEKIVEWSTVFEDKRILREKLNEITWLSDQQKDVLESSRYQGWGRLSKKLLTGIVNDQGERIIDELWNTNKNFMQIQSDNDFAKRIHEANADQMKAVDVEDVLADAYTSPQNKKAIRQVVKVVDDIQKAMGGVAPKYISIEFTRSEDRNPRRTISRQRQLENTLKDTAKSLAKSINPELLSELDNAAKSKKGLTDRLYLYFTQLGKDIYTGKPINIDEISTYDIDHILPQAFVKDDSLNNRVLVSKAINNGKSDNVPVQLFGAKMGHFWKQLAEAGLISKRKLKNLQTDPDTISKYAMHGFIRRQLVETSQVIKLVANILGDKYRNDNTKIIEITARMNHQMRDEFGFIKNREINDYHHAFDAYLTAFLGRYLYHRYIKLRPYFVYGDFKKFKEDKVTMRNFNFLHDLTDDTQEKIADAETGEVIWDRENSIQQLKDVYHYKFMLISHEVYTLRGAMFNQTVYPASDAGKRKLIPIKADRPINVYGGYSGSADAYMAIVRIHNKKGDKYRVVGVPMRARDRLDAAKKVSDADCDRALKDVLTPQLTKTKKSRKTGEITQVVEDFEIVLGKVMYRQLMIDGDKKFMLGSSTYQYNAKQLVLSDQSVKTLASKGRLDPLQESMDYNNVYTEILDKVNQYFSLYDMNKFRHKLNLGFSKFISFPNHNVFDGNTKASSGKREILEEVLNGLHANPTFGNLKDIGITTPFGQLQQPNGILLSDEAKIRYQSPTGLFERTVSLKDL

SEQ ID NO: 220 - protein, 1090 aa, Sphingomonas sp.
MDWRLGLDLGANSLGWAALRLDRAGDPIGILAMGSRIFSDGRDPKSGASLAVDRRAARAMRRRRDRFKQRQAALLKYLIRDGLFPADQADRQRLADEDPYALRARALDEELSLFEIGRALFHLNQRRGFQSNRKADRGQDDEAGKIAVGVDRLNQQMEEQGARTLGEFLHQRRRAATDANHIPSVRTRLRPETGEGAKGDGYDFYPSRALIAEEFEEIWAAQAPHYPDTLTQQVHDRLYEIIFHQRPLRAPQVGQCTLVAGETRLPKAHPLFQKRRLLEEINALMIVRPGEIAQRLTPEERDTLYLKLKDKRTVSFATLRKTLKLDSAARFNKESENRTELKGDEVAAELGAKTRLGTRWQHLSGDQQWEVVHRLMALESQADEAAFRDWISQTYDLLPEQAAAVLGARLPQGHGRFGPTATTTLIDSLLHDRTEDGRVVVYSEAVQRSGLGHHSDLRHDRDDEDVTELPYYGVALERHIMPGTAEPTDPEEMRIGRLTNPTVHIGLNQLRHVVNRLIRAYGPPKEIAIELARELKLSEDEKKKRNSENRDNRLAAEGRSKKLEEIRQRDTGANRALLKLWEELNPGNVLDRRCIYTGEQISIDMLFSDRVEVDHILPFAQTLDDSNGNKLLCLREANREKRRRSPYEAWGHTDRWPDIAERASRLPKPKRWRFEPDAMQRFATEDGFLARHLVDTQYLGRLAREYLSWLYPGRGEGSGHVWVSPGRLTEMVRRKLGLNDLLPDHNFGGGADQPKNRLDHRHHAIDALVVAIVDRGMLQAIARASGQDGSEGRERIHIPAPWDGFRDDLRVAVNGIIVSHRPDHGTVAKAGLARGRDQTAGRLHNDTAYGLTGETDAKGNSIVVRRIPLSAIKKPADIARVRDPLLRNALAEFTKGLDGKAFEARIGRFHELGPLLYRGIRRVRVVETLTVIPIRDAEGRAYKGYKGDSNYRYDVWEMPDGKWRCQVVSMFDAHQSTEQARPHPAARKILSLQRNDILAIERTEGDRELVRVVKFSEKQFAVAPPHEGGSLKTRDGNADDPFRYLYPSPNTLKGWRARQVRIDELGRVLDPGFPARKSVRRTRPRAAPVD

SEQ ID NO: 221 - protein, 1000 aa, Kingella kingae
MARAQRRLISRRANRMNKLRRLLKQENVLQANDYDEKGLIIGLPNQAWELRAQGLDRKLEPKEWAAVLINLVKHRGYLSQRKNESQTADKELGALLSGMNHNHQLLQSQSNQYRTPAELAIKQFATQDGHIRNQRGAYTHTFNRLDLQNELNQLFDAQTRLGNPHVSGSLKTAINDLLMNQKAALSGDAILEMLGRCTFEPSEYKAAKNTYSAERFVWLGKLTNLRIQDNGLESALSREQRELLLNEPYNKTKLTYQQVRKLLRLPETAFFKGLRYGKDNAESATFMEMKSYHAIRKSLENKSLKSEWEKLKTQPKLLDLIGTAFSIYKTDDEIAGCLKNQLPENVIIALQEQLNFSNFMELSLKALEKLLPLMEQGLRYDEACTQIYGNRHEKIADKTEKFLPNIPADKLRNPVVLRTLTQARKVINAIIRRYGSPARVHIETGREVGKSFSDRDKLKKQQEENQEQRRRAIDEWKQFFPNAAHEPKAVDILKLRLYQLQQGKCLYSGLPIDVRRLPEKGYVEIDHALPFSRTWDDSFNNKILVLASENQNKGNQTPYEYLRGADNSESWRLFVENVQNCQFSPNKKQKIMAKQLDEKGFLERNLNDTRYVSRFLCQFISEHLHLTGKGKKRVFASNGQITALLRGRWGLSKNREENDRHHAVDAVVVACSTVAMQQKITQFVRYQKGNVFTGERIDKETGEVISIHFPTPWEHFREEVMIRVFDDNPLRTLPEKLPNRPEALHEYVMPLFVSRMPTRKMTGQGHKETIKSAKRLDEKISVLRVPLTQLKLNDLENMVNREREPALYEALKARLEQFKNDPAKAFAEPFFKQGGQQVKAVRVEIVQKSGMLLRKINGVADNGSMVRVDVFEKSGKFYLVPIYAWQVAEGILPNYAVVAHKDESDWILMDESYHFKFALYKNDLLEVQTKKGGIMGYFASLDRATGAITIREHDRDKKKCKDGEHRSIGVKMASSFKKLQVDELGKNIHETRSRKRPNIG

SEQ ID NO: 222 - protein, 1130 aa, Streptococcus pasteurianus
MTNGKILGLDIGIASVGVGIIEAKTGKVVHANSRLFSAANAENNAERRGFRGSRRLNRRKKHRVKRVRDLFEKYGIVTDFRNLNLNPYELRVKGLTEQLKNEELFAALRTISKRRGISYLDDAEDDSTGSTDYAKSIDENRRLLKNKTPGQIQLERLEKYGQLRGNFTVYDENGEAHRLINVFSTSDYEKEARKILETQADYNKKITAEFIDDYVEILTQKRKYYHGPGNEKSRTDYGRFRTDGTTLENIFGILIGKCNFYPDEYRASKASYTAQEYNFLNDLNNLKVSTETGKLSTEQKESLVEFAKNTATLGPAKLLKEIAKILDCKVDEIKGYREDDKGKPDLHTFEPYRKLKFNLESINIDDLSREVIDKLADILTLNTEREGIEDAIKRNLPNQFTEEQISEIIKVRKSQSTAFNKGWHSFSAKLMNELIPELYATSDEQMTILTRLEKFKVNKKSSKNTKTIDEKEVTDEIYNPVVAKSVRQTIKIINAAVKKYGDFDKIVIEMPRDKNADDEKKFIDKRNKENKKEKDDALKRAAYLYNSSDKLPDEVFHGNKQLETKIRLWYQQGERCLYSGKPISIQELVHNSNNFEIDHILPLSLSFDDSLANKVLVYAWTNQEKGQKTPYQVIDSMDAAWSFREMKDYVLKQKGLGKKKRDYLLTTENIDKIEVKKKFIERNLVDTRYASRVVLNSLQSALRELGKDTKVSVVRGQFTSQLRRKWKIDKSRETYHHHAVDALIIAASSQLKLWEKQDNPMFVDYGKNQVVDKQTGEILSVSDDEYKELVFQPPYQGFVNTISSKGFEDEILFSYQVDSKYNRKVSDATIYSTRKAKIGKDKKEETYVLGKIKDIYSQNGFDTFIKKYNKDKTQFLMYQKDSLTWENVIEVILRDYPTTKKSEDGKNDVKCNPFEEYRRENGLICKYSKKGKGTPIKSLKYYDKKLGNCIDITPEESRNKVILQSINPWRADVYFNPETLKYELMGLKYSDLSFEKGTGNYHISQEKYDAIKEKEGIGKKSEFKFTLYRNDLILIKDIASGEQEIYRFLSRTMPNVNHYVELKPYDKEKFDNVQELVEALGEADKVGRCIKGLNKPNISIYKVRTDVLGNKYFVKKKGDKPKLDFKNNKK

SEQ ID NO: 223 - protein, 1119 aa, Lactobacillus coryniformis
MGYRIGLDVGITSTGYAVLKTDKNGLPYKILTLDSVIYPRAENPQTGASLAEPRRIKRGLRRRTRRTKFRKQRTQQLFIHSGLLSKPEIEQILATPQAKYSVYELRVAGLDRRLTNSELFRVLYFFIGHRGFKSNRKAELNPENEADKKQMGQLLNSIEEIRKAIAEKGYRTVGELYLKDPKYNDHKRNKGYIDGYLSTPNRQMLVDEIKQILDKQRELGNEKLTDEFYATYLLGDENRAGIFQAQRDFDEGPGAGPYAGDQIKKMVGKDIFEPTEDRAAKATYTFQYFNLLQKMTSLNYQNTTGDTWHTLNGLDRQAIIDAVFAKAEKPTKTYKPTDFGELRKLLKLPDDARFNLVNYGSLQTQKEIETVEKKTRFVDFKAYHDLVKVLPEEMWQSRQLLDHIGTALTLYSSDKRRRRYFAEELNLPAELIEKLLPLNFSKFGHLSIKSMQNIIPYLEMGQVYSEATTNTGYDFRKKQISKDTIREEITNPVVRRAVTKTIKIVEQIIRRYGKPDGINIELARELGRNFKERGDIQKRQDKNRQTNDKIAAELTELGIPVNGQNIIRYKLHKEQNGVDPYTGDQIPFERAFSEGYEVDHIIPYSISWDDSYTNKVLTSAKCNREKGNRIPMVYLANNEQRLNALTNIADNIIRNSRKRQKLLKQKLSDEELKDWKQRNINDTRFITRVLYNYFRQAIEFNPELEKKQRVLPLNGEVTSKIRSRWGFLKVREDGDLHHAIDATVIAAITPKFIQQVTKYSQHQEVKNNQALWHDAEIKDAEYAAEAQRMDADLFNKIFNGFPLPWPEFLDELLARISDNPVEMMKSRSWNTYTPIEIAKLKPVFVVRLANHKISGPAHLDTIRSAKLFDEKGIVLSRVSITKLKINKKGQVATGDGIYDPENSNNGDKVVYSAIRQALEAHNGSGELAFPDGYLEYVDHGTKKLVRKVRVAKKVSLPVRLKNKAAADNGSMVRIDVFNTGKKFVFVPIYIKDTVEQVLPNKAIARGKSLWYQITESDQFCFSLYPGDMVHIESKTGIKPKYSNKENNTSVVPIKNFYGYFDGADIATASILVRAHDSSYTARSIGIAGLLKFEKYQVDYFGRYHKVHEKKRQLFVKRDE

SEQ ID NO: 224 - protein, 1126 aa, Lactobacillus farciminis
MADRISLGLDIGVASVGFSVLDIDKGKVIELGARLFSATVAAGNQDRRDMRGARRLLNRNKQRRQDTGKLFKKFGLIDDFDKGSFYDNFNQNLNPYELRVKGLTEQLTKEELAESLYQIVKHRGISYALKDADVDEGGTDYSVSLKINSQELAEKTPAQIQLQRLNDYGKVRGQVVIGDDPDNQKVLLNVFPTSAYEKEAKQIIATQQQFYPESLTDKFTEEYCQILTRKRDYFVGPGNEKSRTDYGIYKTDGRTLDNLFEELIGHDKIYPEELRASAASYTAQLFNVLNDLNNLRILNYEDGKLTKEDKEKIIAEIKNNTTTINMLNVIKKVAGCSKDDIKGFRVNEKDKPEISSMPVYRKIHKDLLKAGVDISDWPVEFIDELSFILTLNTENGEIRKQLNNRLAPKFDFLNADLIQLIIDNKDSFEIKTNNKWHRFSVKTMNKLIPEMMERPVEQMTLLNEMGLVKKDKKRFENNKYLPYKEIAKDIFNPVASKSVREALKIVNAVLKKYGHIDYLVVEMPRDKNLKEEQDNIKEFQNKNKKAKDAAFEAFVKSVGSEQRVKEALSKNRKLQMKMRLWYQQQEIDPYNGKTIDATDLINNPDKFEIDHIIPQSISFYDSINNKTLCFASMNQVKGQKTPYEFMLEGHGQSYDKFKATVMANKNFGKAKRANYLFEENVSDIETRKRFLSRNLVDTRYSSRVVLNSLQDFFREKSADTKVTVIRGKFTSNMRKHWHIDKTRETFHHHAIDASIIAATPFLRMWKKGGTIFPVKVGEESIDIETGEILDDKNFDKAMYEEPYSGFVSEIMNADDRIKFSHQVDKKMNRKVSDATIYSTRTGKLAKDKKDAEYIVAKVKDIYSVDGFKKFKKVYDKDKTKFLLYKYDPRTFSKLERIISDCPDKVEKVQTNGKVKAVDISPFEMYRRDHGMIKKYSKKGNGPAIKQLKYLDKKLGSHIDITPANANGKHVILQSLKPWRTDVYLNHETGEYEIMGIKYSDLKFNKNEGYGIKKDKYLEIKKVEEVSEKSEFMFSLYRKDRVKVQDMKTGESVELLFWSRNFSNKKYAELKPISQAENDKKLPVYGKGRLIKRLIPKNCKIWKVNTTILGDPYYLEKESDSPKDILD

SEQ ID NO: 225 - protein, 1380 aa, Eggerthella sp.
MNLRHVGNYNIGLDMGTASVGWAAIDEQGELLHFKGKPTWGSRLFDSANTAATARMPRGQRRRYIRRRWRLDLLQKFFSEEMAEKDPEFFIRLRQSSLWPEDREGGHTAYHWPLFNDSDFNEKEYYEKFPTIFHLRQWLMETDEKADIRLIYLAFHNIVKHRGNFLQENNDSLSAQNANMRESLESFCIALEEWCDEKELTCSCDPQKLEHLFKEVKYRSDIRDGFAALLGLACSGENEVDVKAMAKEMGKAIVGYKADFSKIFTECDKEGSSFRLSDDEGPEAFLDICPDDGIALFEAIQMVYSSFILTGMLTEKGLSLSKISAYNQYGQDLESLKALVKEYVPNEYSSFFRGPTYSGSTEYDPSKAQGYTRYNLGPSKKGSGAKPMAYEDFKKSVEQLFANTNAINDERYKEMMGRFAEEKFLRRLRTSDNGRIPFQLNLEEMTAIIINQGKYYPFLLEQQEKLESLVRFRIPYYVGPLTRINARLDSKGNACFAWSKRKDGMDSASIKPWNWDEVIDKHASAQAFIERMTGTCTYLRGEPVLPRCSLLYEEYCVLNELNGARWTQDGDKFIRFDYKDRSDIIEELFKKRRGRIQYAAVADWMKQERSHANVHVSGGQGENAFESRLSSYHFFCNDVFGVDELPGSYVDMVEEIILWSTLFEDRSILREEIQRKYGDVLNEEQIKTICKKRFSGWGRLSRKLLCSLKAQTDNGPKSIMDILQEGDQNNGRVGRAMVFQEILHDEQLGFEQKIEEENTQSMLEGENLLIEDLPGSPAIRRSINQAVRIVDEIVGIAGHAPDNIFIEVTREDDTKKKGKRTTTRYSNIQKALEALKEEGAEALRELKTYKHNELDKRLSLYFMQNGKSLYSGIPLDIRRLSEYQIDHIIPQSYIKDDSYENMALVLPGENQSKADNLLISQDIRIKMKATWTALHKAGLMGDKKYNNLMNSSISDAKMKGFINRQLVETSQSVKLTQMMLSQKYPGAKVRPIKASISSQLRDACDLVKCREANDYHHAHDAYLACQVGRFVLKRHSSMFDNPIGMTKVIRDFVKRQGQEFKRNGKLPAYASRSGFIVQSFMRSGFDAETGELLRDDWNAPFEIARIKRCLNYRDCYISRMPMEDSGAFWDATIYSPKAGKKGALPVKQGLPVEKYGSYSREQFAYFFVYKAYNPKKKAYRLEFEAVPVRVASAVETRENALEEYAKSVAKQAGLEFVEVARPKVYKYQLIELGEDRLYITGKREVRNASQLAFSLDEIDLLKRLAEGEETSSEERERLFDVLIEKYARYAPRLARQLSVDSMSATFETLNAEEQLGILLSLVEIANGKRNMIDLSSAGGSKNAGCMNPTFSSELSSPGSNFTFIDQSVTGMFERRQRLEL

SEQ ID NO: 226 - protein, 1430 aa, Capnocytophaga canimorsus
MKHILGLDLGTNSIGWAVVKEAQNDNEQSEIVDVGVRVNPLTTDEKTNFEKGKPISTNADRTLKRSARRNLQRYKLRRKELIELLKEHQLISTDTILTENGKGTTFQTLELRAKSAKEKISLEELARVFLTINKKRGYKSSRKAKNEDEGQLIDGMEIAKRLYEENLTTGQLSLQLLKEGKKSLPDYYRSDLQFELDKVWNFQKQFHSHILTDEFYAQLKGKGQRATSALFLAKYQIYTAENKGSREDKKLQAYQWRVDALSKELTREQLAFVITEINNNLNNSSGYLGAISDRSKELYFNNETVGEYLWKQIAANPHTSLKNQVFYRQDYLDEFEQIWKTQSAFYPEILTDELKKELRDVVIFYQRKLKSQKSLVSFCEFENKEIEIKKEDGTSTKKVIGLKVAPKSSPLFQEFKIWQNLNNVLIRKKGSKTKKVDKNQQAVLFEEEKTIFELDLEAKQALFNELNLKGNLKAYYCLEILGYSPKEWEMNYSVLEGNRTNKALYEAYLKITDLEGYDAKNHLKVKLNKDEVELDDLKVPASEIKDMVQAIFKEAGINTDILHFNAELDGKDFENQASYQLWHLLYSYEGDDSKSGNELLYKLLETKFGFKKEYAQILANVSLSDDYGSLSTKAMRKIHPYIKENKFSTACELAGYRHSKHSLTKEENDNRVLKDSLEVLKKNSLRQPVVEKILNQMINLVNALLKKYRTENPNFKFDEIRIELARELKKNAEERANMTVNINKAKTEHEKIIKILKNEFGLPNPTRNDIIRYRLYEELKANGYKDLYTNEYIEKQDLFTKNIDIEHIIPKSRVFDDSFSNKTLSFRKTNLDKGERTAFDYIESKFGADKLEEYVARVEDLYKNNIISKAKYQKLLKKESEIGDGFVERDLRETQYIAKKAKEILLQITPNVLSTSGGITDRLREDWDLINVMKELNLPKYRALGLTQMEDRKYGQQVEVIIDWTKRNDHRHHAMDALTVAFTKHNHIQYLNYLNARKNEKHREHSNIMGIQQLETIKVTDKNGNEKRVFKAPMPNFRQVTKAFLENVLISHKAKNKVVTKNKNKVAGSNKVQEVLTPRGQLHKETVYGKYQYYVQKEEKIGGKFDLETIKKVANPLYQSLLKKRLEENGGDPKKAFTGKNSLAKNPIYLDDAQTEQLPEKVKLVWLENSFSIRKDITPENFKDEKLIDKILDEGVKRILKERLQSFGNDAKKAFSDLDKNPIWLNKEKGIAIKRVAISGVANAEPLHTKKDHLGKEILDKEGKSIPVDFISTGNNHHVAVYRDEKGNLQEKVVSVFEAVVRANQGLPIIDKTYNQHLGWEFLFTMKQNEMFVFSNESTGFNPNDIDLLDPKNKKIISPNLFRVQKFSKLQYGNSFVREFVFRHHLETTVEDRKELQGITYKQMKNSAFFNDIIKVRINHLGGIVSVGEY

SEQ ID NO: 227 - protein, 1348 aa, Finegoldia magna
MKSEKKYYIGLDVGTNSVGWAVTDEFYNILRAKGKDLWGVRLFEKAKTAADTRTFRSGRRRNDRKGVRLQILREIFEDEIKKVDKDFYDRLDESKFWAEDKKVSGKYSLFNDKNFSDKQYFEKFPTIFHLRKYLMEEHGKVDIRYYFLAINQMMKRRGHFLIDGQISHVTDDKPLKQQLILLINDLLKIELEEEFMDSIFEILADVNEKKTEKKNILKELINAQDFNKQEGKILYSIFESIVTGKAKIKNIISDEDILEKIKEDNKEDFVLTGDSYEENLQYFEEVLQENITLFNTLKSAYDFVILQSILKGKSTLSDAQVERYDEHKKDLEILKKVIKKYDEDGKLFKQVFKEDNGNGYVSYIGYYLNKNKKITAKKKISNIEFTKYVKGILEKQCDCEDEDVKYLLGKIEQENFLLKQISSINSVIPHQIHLFELDKILENLAKYYPSFNNKKEEFTKIEKIRKTFTFRIPYYVGPLNDYHKNNGGNAWIFRNKGEKIRPWNFEKIVDLHKSEEEFIKRMLNQCTYLPEETVLPKSSILYSEYMVLNELNNLRINGKPIDTDVKLKLIEELFKKKTKVTLKSIRDYMIRNNFADKEDFDNSEKNLEIVSNMKSYIDFNNILGDKFELEMVEDLIEKITIHTGNKKLLKKYIEETYPDLSSSQIQKIINLKYKDWGRLSRKLLDGITGTNIETGEIDTVINFLRNSSDNLMQIIGSQNYSFNNDIDKLRKKYIPQEISYEVVENLYVSPSVKKMIWQVIRITEEITKVMGYDPDKIFIEMAKSEEGKKTTISRKNKLLALYKAIKKDERDSQYEKLLTGLNKLDDSDLRSRKLYLYYTQMGRDMYTGEKIDLDKLFDSTHYDKDHIIPQSMKKDDSIINNLVLVNKNANQTTKGNIYPVPSSIRNNPKIYNYWKYLMEKEFISKEKYNRLIRNTPLTNEELGGFINRQLVETRQSTKAIKELFEKFYKKSKIIPVKAILASDLRKDMNTLKSREVNDLHHAHDAFLNIVAGDVWNREFTSNPINYVKENREGDKVKYSLSKYFTRPRKSKGKVIWTPEKGRKLIVDTLNKPSVLISNESHVKKGELFNATIAGKKDYKKGKIYLPLKKDDRLQDVSKYGGYKAINGAFFFLVEHTKSKKRIRSIELFPLHLLSKFYEDKNTVLDYAINVLQLQDPKIIIDKINYRTEIIIDNFSYLISTKSNDGSITVKPNEQMYWRVDEISNLKKIENKYKKDAILTEEDRKIMESYIDKIYQQFKAGKYKNRRTTDTIIEKYEIIDLDTLDNKQLYQLLVAFISLSYKTSNNAVDFTVIGLGTECGKPRITNLPDNTYLVYKSITGIYEKRIRIK

SEQ ID NO: 228 - protein, 1352 aa, Megasphaera sp.
MKKRNREEYYVGLDIGTSSVGWAVATPDYRIPKFRGHKMWGSRLFAEGKRAAERRQFRTNRRRLARRRDRLQILEELFAEEMAKVDNTFFMRLKESKFFLEDKTVKEKHILFSTDKFDADRFYKDNPTIYHVRKRLMEEEPQDIRELFLAVHHILKYRGHFLFAGSLEQNGASIEELVRTLLGKQGLAILDDTIDSNEMVNILKNTGETKSDRKKDVQELWNPLKDKVKKAQAAEMAGLVLGLKSDISKLFANSDYKDLDSSIKNINFSSGDYEEKRDDYANSIGDDIVLLDTMKALYDTLILSQILQGKRSISAAKVEDYNTHKEQLRALKAILKPHKRLYNEMFRENNKKDLSNYVAYISSYSEGKRVNREGFYKYVQAVLKQVDDSDSKQAILEAIRLETFLPLLRVKDNAVIPHQIHQAELEAILETARKKYNFLNDVSDGVSVKDKIIQLFTFRIPYYVGPLNPHSGETVADRKQGTGWVVRKQRGKVYPWNFADMVDVKASAEAFITNLTNKCTYLIGEDVLPKRSLLYSEFMLLNELNMIKYDGHELPVAIKQLYIEQVFKQEHKKQTKGRVLDFLKRNGLITGSATAVITGMDDAIKGDLQSYRDMVRIFGAGFDHSMAERIIRWVTLFGEAKDILENKIREVYGNSISDSQMRAIKKLKYADWGRLSQAFLIAVKGCDKSGVERNIITCLRASSQNLMEILSDQGTYIKQIKAWNHQHTTNMMDTLDYQLVDDLYVAPSVKRSIWQSLCIVEELVKIMGQAPKKIFVEVTRTKQAEKTKKDSRKKRLVELYTAIGKEGAAWKKEIEAHQAGDFRRKKLYLYYTQMGRCMYSNEPIAMDALFTSAYDIDHIYPQSLTKDGSWDNLVLVKSQLNKEKSDQYPLRPAIREKNKAHWQYLCRAGFISEKKYERLMRTTELTAEELSGFIARQLVETSQATKAVTGLLERIYTNTEICFVKAETVSQFRHQHNFIKIRELNNYHHAKDAYLNIVVGNVYHEKFTKNPWEFIARSTERRPYNLNRMYDFDLLKQGRVIWQVPKSLETVQAMMKSNDVRITKKLLVQKGELYDATITKAHKAKEGTYFPLKGADARLRDVHRYGGYEKIKIAYYSVFSCREKASNTIHTLIIPIPVYKAGLLQTEADLTAYAWQTKQKTKPIKDIYSAITPIYKKLCINTVVKIDGFKYFLGGKTGDYMWLDPAIPVVLDEQAAAYLKAISKVGRADDVENTAQAIDLITAEANEAFYDVLLKKMEAKIFAKAYQTIVEKLASETARERFRELSIGAQCSCLLEILNLLANNKTTFTFFKDKMGVTMSRRKQPMDLTKLEECIVYETSITGLYEKAVSLL

SEQ ID NO: 229 - protein, 650 aa, Haemophilus pittmaniae
MENKNLHYILGLDLGIASVGWAVVEIDKEENPLCLIDVGVRTFERAEVPKTGESLALSRRLARSARRLTQRRVARLKKAKRLLKLENILLSTDERLPHQVWQLRVEGLDRKLKRQEWAAVLLHLIKHRGYLSQRKNESKSENKELGALLSGVASNHELLQQTTYRTPAELAVKKFEVEEGHIRNQQGAYTHTFSRLDLLAEMELLFSRQQHFGNPFASEKLLENLTALLMWQKPALSGEAILKMLGKCTFEDEYKAAKNTYTAERFVWITKLNNLRIQENGLERALNDNERLILIEQPYEKAKLTYAQVRSILNLSDEAIFKGLRYSGEDKKAIETKTTLMEMKAYHQIRKVLEGNNLKAEWTELKENSTLLDEIGTAFSLYKTDEDISTYLAGKLSQPVLNALLENLSFDKFIQLSLKALYKLLPLMQQGLRYDEACHEMYGDHYGKKTYGKKTEENHYFLPQIPADEIRNPVVLRTLTQARKVINGVVRLYGSPARIHIETGREVGKSYKDRRELEKRQEENRKQRENAIKEFKEYFPHFAGEPKAKDILKMRLYKQQNAKCLYSGKPIELHRLLEKGYVEVDHALPFSRTWDDSFNNKVLVLANENQNKGNLTPFEWLDGKHNSERWRAFKALVETSAFPYAKNNAS

SEQ ID NO: 230 - protein, 1062 aa, Ralstonia syzygii
MAEKQHRWGLDIGTNSIGWAVIALIEGRPAGLVATGSRIFSDGRNPKDGSSLAVERRGPRQMRRRRDRYLRRRDRFMQALINVGLMPGDAAARKALVTENPYVLRQRGLDQALTLPEFGRALFHLNQRRGFQSNRKTDRATAKESGKVKNAIAAFRAGMGNARTVGEALARRLEDGRPVRARMVGQGKDEHYELYIAREWIAQEFDALWASQQRFHAEVLADAARDRLRAILLFQRKLLPVPVGKCFLEPNQPRVAAALPSAQRFRLMQELNHLRVMTLADKRERPLSFQERNDLLAQLVARPKCGFDMLRKIVFGANKEAYRFTIESERRKELKGCDTAAKLAKVNALGTRWQALSLDEQDRLVCLLLDGENDAVLADALREHYGLTDAQIDTLLGLSFEDGHMRLGRSALLRVLDALESGRDEQGLPLSYDKAVVAAGYPAHTADLENGERDALPYYGELLWRYTQDAPTAKNDAERKFGKIANPTVHIGLNQLRKLVNALIQRYGKPAQIVVELARNLKAGLEEKERIKKQQTANLERNERIRQKLQDAGVPDNRENRLRMRLFEELGQGNGLGTPCIYSGRQISLQRLFSNDVQVDHILPFSKTLDDSFANKVLAQHDANRYKGNRGPFEAFGANRDGYAWDDIRARAAVLPRNKRNRFAETAMQDWLHNETDFLARQLTDTAYLSRVARQYLTAICSKDDVYVSPGRLTAMLRAKWGLNRVLDGVMEEQGRPAVKNRDDHRHHAIDAVVIGATDRAMLQQVATLAARAREQDAERLIGDMPTPWPNFLEDVRAAVARCVVSHKPDHGPEGGLHNDTAYGIVAGPFEDGRYRVRHRVSLFDLKPGDLSNVRCDAPLQAELEPIFEQDDARAREVALTALAERYRQRKVWLEELMSVLPIRPRGEDGKTLPDSAPYKAYKGDSNYCYELFINERGRWDGELISTFRANQAAYRRFRNDPARFRRYTAGGRPLLMRLCINDYIAVGTAAERTIFRVVKMSENKITLAEHFEGGTLKQRDADKDDPFKYLTKSPGALRDLGARRIFVDLIGRVLDPGIKGD

SEQ ID NO: 231 - protein, 1052 aa, Haemophilus parainfluenzae
MENKNLHYILGLDLGIASVGWAVVEIDEKENPLRLIDVGVRTFERAETQKGESLALSRRSARSARRLTQRRVARLKKAKRLLKSENILLSTDERLPHQVWQLRVEGLDRKLERQEWAAVLLHLIKHRGYLSQRKNESKSENKELGALLSGVASNHELLQQATYRTPAELAVKKFEVEEGHIRNQQGAYTHTFSRLDLLAEMELLFSRQQHFGNPFASEKLLENLTALLMWQKPALSGEDILKMLGKCTFEDEYKAAKNTYTAERFVWITKLNNLRIQENGLERALSDNERLMLIEQPYEKAKLTYAQVRSILNLSDDAIFKGVRYSGEDKKAIETKTTLMEMKAYHQIRKVLEGNNLKAEWVALKANPTLLDEIGTAFSLYKTDEDISAYLAGKLSQPVLNALLENLSFDKFIQLSLKALYKLLPLMQQGLRYDEACREIYGDHYGKKTEETHHFLPQIPADEIRNPVVLRTLTQARKVINGVVRLYGSPARIHIETGREVGKSYKDRHELKKRQEENRKQREKTISEIKTLFPNFSGEPKGKDILKMRLYYQQNAKCLYSGKPLELHRLFEQKYVEVDHALPLSRTWDDSFNNKVLVLANENQNKGNLTPFEWLDGKNNSERWRTFKALVETSAFPYAKKQRILSQKLDEKGFIERNLNDTRYVARFLCNFIADNMHLTGEGKRKVFASNGQITALLRRRWGLAKSREDNDRHHALDAVLVACSTVAMQQKITRFVRFKAGDVFTGERIDRETGEIIPLHFPTPWQFFKQEVEIRIFSDNPKLELENRLPDRPQANHEFVQPLFVSRMPTRKMTGQGHMETVKSAKRLNEGISMIKMPLTKLKLKDLELMVNREREKDLYDALKTRLEAFNDDPAKAFAEPFMKKGGAIVKSVRVEQVQKSGVLVRQGNGVADNASMVRVDVFTKDGKYFLVPIYTWQVAKGILPNKAVIQGKDEEDWEDIDDATFQFSLHPNDLISVKTKKDEFLGYFNGLNRHTGGINIRTHDLEKSKGKQGIFEGIGVKIALSFEKYQIDELGKNIRLCKPSKRQPVR

SEQ ID NO: 232 - protein, 1331 aa, Lactobacillus sanfranciscensis
MNKQPYNIGLDIGTSSVGWSATELDNRLLHIKGHNGIGVRLFKEGESAADRRGFRTTRRRLARRKWRLRLLNEIFATEIAKVDPSFFARLKQSNVSPKDPNKTMFENILFDDENLDDQKFHHDYKTIYHLRQAIINHPEQKFDIRLIYLAMHHIIKYRGHFLNQANVQDFKGGKIDLEKSFKALNDIFENQGRDLRLVTDKANQYVKVLSDNAKTRSDRKKELSKLLYVPIDKDTDKNSKKVTGEILKAILGNKAKFDVIFGIEVENPKEWVLTFNSDDFDDKIEGLSSQMTDEDSEILLILKELYFALNLSDILNNSVTDKNAKTLSEAMINRYDDHKNQLAMLKKVIDSSDKKHAKELKEAYSAYIDGENNKKISFEDLKKRIQKNLVDSELSQKINDLLDHDYFLPKQRSKENGAIPHQLQQQELDQIIESQKQYYPFLAELNPNEKRSRQAKYKLDELVAFRVPYYVGPMVEVTDSNQENNGKFAWMIRKEQGEITPWNFDEKVDRTETATKFITRMTTTDTYLIGEPVLPKNSLLYQKFVVLNELNNLKINQEIITPGQKQYLYEHVMKKNKRVTLKKIADALVIKGDYPYAPEVKGTTDQKNLNNGLTTYIDLAKIFGNELDDVDREADFEKIIEWSTIFEDQHIFALKLQELKWLTEKQRNQVVKLRYQGWGKLSKELLAGLVDDNGQRIIDLLWSDNQNFMQIVNQKSFKESIADHNGAHLEEKNLKDVINDLYTSPQNKKAIRQVILVVDDIINAVGYEPANIMMEFAREDSNDHRLTNSRSRQLENVYKDITNSWFDNDSVKDELEDKIKNKDKFTDRLYLYFTQGGKDLYTGEPLNIDDLSSYDIDHILPQSFILDNSLDNRVLTSQRNNRVSKEDQLPGELFGTKMHAFWKRLKAAHLISNKKYYNLTLTPNSISKFNNQGRFINRQLVETRQVIKLAAEILHNRYSEEKGTNIVTIKANLTHHMREKFNFYKNRNVNDYHHAFDAYLTAFVGNWLLQQYPKLKPYFVYGDFAKTEINNLKSFNMLYKFEQAHQLNEKDGKIAKDADALLGYMKNVYHFKKMLVTKKLETNHGALFKQTLYPSPAHDIKKRQLIKPKDNRPTDIYGGYTHEERKYMSLVKVIGKKDNEYRMANVPLLKINKNNDIKEILKSQFSNKKFEIVLPKVLKNQLFSENGALFVIGSKGYKYNANQLVLSDLDMKLLNDLSNNKSIDEVTINQLFKNIVDSTNKYMPLYEIKNLNEVVEKFNNLEFNDKKKTITDFLLATHANPTMSNLKNIGLPSYFGRFTSGNAGIKLSENANVIYQSPTGLFSRKVKISDF

SEQ ID NO: 233 - protein, 1473 aa, Flavobacterium branchiophilum
MAKILGLDLGTNSIGWAVVERENIDFSLIDKGVRIFSEGVKSEKGIESSRAAERTGYRSARKIKYRRKLRKYETLKVLSLNRMCPLSIEEVEEWKKSGFKDYPLNPEFLKWLSTDEESNVNPYFFRDRASKHKVSLFELGRAFYHIAQRRGFLSNRLDQSAEGILEEHCPKIEAIVEDLISIDEISTNITDYFFETGILDSNEKNGYAKDLDEGDKKLVSLYKSLLAILKKNESDFENCKSEIIERLNKKDVLGKVKGKIKDISQAMLDGNYKTLGQYFYSLYSKEKIRNQYTSREEHYLSEFITICKVQGIDQINEEEKINEKKFDGLAKDLYKAIFFQRPLKSQKGLIGKCSFEKSKSRCAISHPDFEEYRMWTYLNTIKIGTQSDKKLRFLTQDEKLKLVPKFYRKNDFNFDVLAKELIEKGSSFGFYKSSKKNDFFYWFNYKPTDTVAACQVAASLKNAIGEDWKTKSFKYQTINSNKEQVSRTVDYKDLWHLLTVATSDVYLYEFAIDKLGLDEKNAKAFSKTKLKKDFASLSLSAINKILPYLKEGLLYSHAVFVANIENIVDENIWKDEKQRDYIKTQISEIIENYTLEKSRFEIINGLLKEYKSENEDGKRVYYSKEAEQSFENDLKKKLVLFYKSNEIENKEQQETIFNELLPIFIQQLKDYEFIKIQRLDQKVLIFLKGKNETGQIFCTEEKGTAEEKEKKIKNRLKKLYHPSDIEKFKKKIIKDEFGNEKIVLGSPLTPSIKNPMAMRALHQLRKVLNALILEGQIDEKTIIHIEMARELNDANKRKGIQDYQNDNKKFREDAIKEIKKLYFEDCKKEVEPTEDDILRYQLWMEQNRSEIYEEGKNISICDIIGSNPAYDIEHTIPRSRSQDNSQMNKTLCSQRFNREVKKQSMPIELNNHLEILPRIAHWKEEADNLTREIEIISRSIKAAATKEIKDKKIRRRHYLTLKRDYLQGKYDRFIWEEPKVGFKNSQIPDTGIITKYAQAYLKSYFKKVESVKGGMVAEFRKIWGIQESFIDENGMKHYKVKDRSKHTHHTIDAITIACMTKEKYDVLAHAWTLEDQQNKKEARSIIEASKPWKTFKEDLLKIEEEILVSHYTPDNVKKQAKKIVRVRGKKQFVAEVERDVNGKAVPKKAASGKTIYKLDGEGKKLPRLQQGDTIRGSLHQDSIYGAIKNPLNTDEIKYVIRKDLESIKGSDVESIVDEVVKEKIKEAIANKVLLLSSNAQQKNKLVGTVWMNEEKRIAINKVRIYANSVKNPLHIKEHSLLSKSKHVHKQKVYGQNDENYAMAIYELDGKRDFELINIFNLAKLIKQGQGFYPLHKKKEIKGKIVFVPIEKRNKRDVVLKRGQQVVFYDKEVENPKDISEIVDFKGRIYIIEGLSIQRIVRPSGKVDEYGVIMLRYFKEARKADDIKQDNFKPDGVFKLGENKPTRKMNHNQFTAFVEGIDFKVLPSGKFEKI

SEQ ID NO: 234 - protein, 933 aa, Mycoplasma iowae
SVRDYSDGPGSEKSPTPYGLWRLNKEGKVEKIGENLWDVLVGKCTIYGNDDSIKDEKTKLRGGKNSPIAEVFNFINDLTNIYLFSSSKLKLNSKTKLSILDEFNISLKTSKPIKSFSEKKLVKHIISTTEFKDINFDDVYGYRIDTSKKPLFTKLENTITIAKWLLDNNVYNELNIYDQEDLIKINNIFVILQKSMDINKRAQLVSDEYKIDLPICLELVKKIKGVMQTHSFSYKAMLEYIPVGIKYNDLETGEDTSINASTYFVDKINNLNTKLLFNGRPRKYIPKNIFEDGIISPTSKRAFIQTINVLNKIIKVYSKDYDIDNIAIELPRDKNTAEERKKISSNQKKAGEEIAEVLKFAGLNVEEYTSKLNSKTKLKLKLLKEQNYKDIYDGQEIDVIDVIKNSNKYHEEHIIPYSLCFIDSRRNKVLTKFENNKQKGNKTPFQWLSSIGKYAEFKDRVEKLFVEQKISKAKKELLLFEQDPRTEMLGFIEKNLSDTRYASKLVFDTFRDFFKVNNPNVKIKVINGALTNYARYNLFATYKDGLLERKGIMKQREFYEHHGIDATILAFLGSNHKINQLLKLSHKFKKQDDNKIYDENTGELIEFTKDFLSDEARKKAMELSKQIFEIPCKFSRPIYRKSNVSFSNETLISMKWIDDKYTKGVKINKLSLVNKDLDLNEYFADYETNEMKNLICYQEDKTLYNKLKNIYDKYNNFVENSNIKPVKNPFINYMISNFSSDDSKIQNFKHIIFYDHKGNKKFVKSLKVCGDEKNLSNIVLRKDQKDIMNSKKIKKSGILESLNPISARIYKDNKGKYITIPINSLVLNWTKKGLEIDNEKLCNILKSKNIFNNQFIEINAGQSIINNENKLFYFVGGGDFKVNKLEIKSQFCDNEIFFPRKQMNISIATIIDNYKLCEVDELGKIYNIRKIVL

SEQ ID NO: 235 - protein, 1358 aa, Acidaminococcus intestini; identical to SEQ ID NO: 99

SEQ ID NO: 236 - protein, 983 aa, Campylobacter jejuni
MARILAFDIGISSIGWAFSENDELKDCGVRIFTKAENPKTGESLALPRRLARSARKRLARRKARLNHLKHLIANEFKLNYEDYQSFDESLAKAYKGSLISPYELRFRALNELLSKQDFARVILHIAKRRGYDDIKNSDDKEKGAILKAIKQNEEKLANYQSVGEYLYKEYFQKFKENSKEFTNVRNKKESYERCIAQSFLKDELKLIFKKQREFGFSFSKKFEEEVLSVAFYKRALKDFSHLVGNCSFFTDEKRAPKNSPLAFMFVALTRIINLLNNLKNTEGILYTKDDLNALLNEVLKNGTLTYKQTKKLLGLSDDYEFKGEKGTYFIEFKKYKEFIKALGEHNLSQDDLNEIAKDITLIKDEIKLKKALAKYDLNQNQIDSLSKLEFKDHLNISFKALKLVTPLMLEGKKYDEACNELNLKVAINEDKKDFLPAFNETYYKDEVTNPVVLRAIKEYRKVLNALLKKYGKVHKINIELAREVGKNHSQRAKIEKEQNENYKAKKDAELECEKLGLKINSKNILKLRLFKEQKEFCAYSGEKIKISDLQDEKMLEIDHIYPYSRSFDDSYMNKVLVFTKQNQEKLNQTPFEAFGNDSAKWQKIEVLAKNLPTKKQKRILDKNYKDKEQKNFKDRNLNDTRYIARLVLNYTKDYLDFLPLSDDENTKLNDTQKGSKVHVEAKSGMLTSALRHTWGFSAKDRNNHLHHAIDAVIIAYANNSIVKAFSDFKKEQESNSAELYAKKISELDYKNKRKFFEPFSGFRQKVLDKIDEIFVSKPERKKPSGALHEETFRKEEFYQSYGGKEGVLKALELGKIRKVNGKIVKNGDMFRVDIFKHKKTNKFYAVPIYTMDFALKVLPNKAVARSKKGEIKDWILMDENYEFCFSLYKDSLILIQTKDMQEPEFVYYNAFTSSTVSLIVSKHDNKFETLSKNQKILFKNANEKEVIAKSIGIQNLKVFEKYIVSALGEVTKAEFRQREDFKK

SEQ ID NO: 237 - protein, 1338 aa, Streptococcus macacae
MTKPYSIGLDIGTNSVGWAVVTDGYKVPAKKMKVLGNTDKSHIKKNLLGALLFDSGNTAKDRRLKRTARRRYTRRRNRILYLQEIFAEEMAKADESFFQRLNESFLTNDDKEFDSHPIFGNKAEEEAHHHKFPTIFHLRKHLADSTEKSDLRLIYLALAHMIKFRGHFLIEGQLKAENTNVQTLFDDFVEVYDKTVEESHLSEISVSSILTEKISKSRRLENLIKYYPTEKKNTLFGNLIALSLGLQPNFKTNFKLSEDAKLQFSKDTYEEDLGELLGKIGDNYADLFISAKNLYDAILLSGILTIDDNTTKAPLSASMIKRYEEHQEDLAQLKKFIRQNLPDQYSEVFSDKTKDGYAGYIDGKTNQEAFYKYIKNMLSKTEGADYFLDKIDREDFLRKQRTFDNGSVPHQIHLQEMHAILRRQGEYYPFLKENQDKIEKILTFRIPYYVGPLARKGSRFAWAEYKADKKVTPWNFDDILDKEKSAEEFITRMTLNDLYLPEEKVLPKHSLVYETFNVYNELTKVKYVNEQGKAIFFDANMKQEIFDHVFKENRKVTKDKLLNYLNKEFEEFRIVNLTGLDKENKAFNSSLGTYHDLRKILDKSFLDDKVNEKIIEDIIQTLTLFEDREMIRQRLQKYSDIFTTQQLKKLERRHYTGWGRLSAKLINGIRDKQSNKTILGYLIDDGYSNRNFMQLINDDSLPFKEEIARAQVIGETDDLNQLVSDIAGSPAIKKGILQSLKIVDELVKVMGHNPANIVIEMARENQTTAKGRRSSQQRYKRLEEAIKNLDHDLNHKILKEHPTDNQALQNDRLFLYYLQNGRDMYTEDPLDINRLSDYDIDHIIPQSFIKDDSIDNKVLVSSAKNRGKSDNVPSEDVVNRMRPFWNKLLSCGLISQRKYSNLTKKELKPDDKAGFIKRQLVETRQITKHVAQILDARFNTKRDENKKVIRDVKIITLKSNLVSQFRKDFKFYKVREINDYHHAHDAYLNAVIGKALLDVYPQLEPEFVYGEYPHFHGYKENKATAKKFFYSNIMNFFKKDDIRTDENGEIVWKKDEHISNIKRVLSYPQVNIVKKVEIQTVGQNGGLFDDNPKSPLEVTPSKLVPLKKELNPKKYGGYQKPTTAYPVLLITDTKQLIPISVMNKKQFEQNPVKFLRDRGYQQVGKNDFIKLPKYTLVDIGDGIKRLWASSKEIHKGNQLVVSKKSQILLYHAHHLDSDLSNDYLQNHNQQFDVLFNEIISFSKKCKLGKEHIQKIENVYSNKKNSASIEELAESFIKLLGFTQLGATSPFNFLGVKLNQKQYKGKKDYILPCTEGTLIRQSITGLYETRVDLSKIGED

SEQ ID NO: 238 - protein, 1265 aa, Mycoplasma ovipneumoniae
MHNKKNITIGFDLGIASIGWAIIDSTTSKILDWGTRTFEERKTANERRAFRSTRRNIRRKAYRNQRFINLILKYKDLFELKNISDIQRANKKDTENYEKIISFFTEIYKKCAAKHSNILEVKVKALDSKIEKLDLIWILHDYLENRGFFYDLEEENVADKYEGIEHPSILLYDFFKKNGFFKSNSSIPKDLGGYSFSNLQWVNEIKKLFEVQEINPEFSEKFLNLFTSVRDYAKGPGSEHSASEYGIFQKDEKGKVFKKYDNIWDKTIGKCSFFVEENRSPVNYPSYEIFNLLNQLINLSTDLKTTNKKIWQLSSNDRNELLDELLKVKEKAKIISISLKKNEIKKIILKDFGFEKSDIDDQDTIEGRKIIKEEPTTKLEVTKHLLATIYSHSSDSNWININNILEFLPYLDAICIILDREKSRGQDEVLKKLTEKNIFEVLKIDREKQLDFVKSIFSNTKFNFKKIGNFSLKAIREFLPKMFEQNKNSEYLKWKDEEIRRKWEEQKSKLGKTDKKTKYLNPRIFQDEIISPGTKNTFEQAVLVLNQIIKKYSKENIIDAIIIESPREKNDKKTIEEIKKRNKKGKGKTLEKLFQILNLENKGYKLSDLETKPAKLLDRLRFYHQQDGIDLYTLDKINIDQLINGSQKYEIEHIIPYSMSYDNSQANKILTEKAENLKKGKLIASEYIKRNGDEFYNKYYEKAKELFINKYKKNKKLDSYVDLDEDSAKNRFRFLTLQDYDEFQVEFLARNLNDTRYSTKLFYHALVEHFENNEFFTYIDENSSKHKVKISTIKGHVTKYFRAKPVQKNNGPNENLNNNKPEKIEKNRENNEHHAVDAAIVAIIGNKNPQIANLLTLADNKTDKKFLLHDENYKENIETGELVKIPKFEVDKLAKVEDLKKIIQEKYEEAKKHTAIKFSRKTRTILNGGLSDETLYGFKYDEKEDKYFKIIKKKLVTSKNEELKKYFENPFGKKADGKSEYTVLMAQSHLSEFNKLKEIFEKYNGFSNKTGNAFVEYMNDLALKEPTLKAEIESAKSVEKLLYYNFKPSDQFTYHDNINNKSFKRFYKNIRIIEYKSIPIKFKILSKHDGGKSFKDTLFSLYSLVYKVYENGKESYKSIPVTSQMRNFGIDEFDFLDENLYNKEKLDIYKSDFAKPIPVNCKPVFVLKKGSILKKKSLDIDDFKETKETEEGNYYFISTISKRFNRDTAYGLKPLKLSVVKPVAEPSTNPIFKEYIPIHLDELGNEYPVKIKEHTDDEKLMCTIK

SEQ ID NO: 239 - protein, 1535 aa, Flavobacterium columnare
MTKILGLDLGTNSIGWAIRDTENEGINQILDKGARIFSEGVKSENGKEISRAAERTAYRSARKIKYRRKLRKYETLKVLSINGMCPLSVEEVEQWKKSGFKEYPLNPEFLDWLRTNEDKNINPYLFRDKASKQKVTLFELGRALYHIAQRRGFLSNRLDQSAEGVFEEHNPQIQNLIEDLDSSNTILNELKEYYINLGIIDETEKSGFKKDLDEGEKKLKSLYNSLVAITKKNANDIETCKQELIARLNKKEDLGKVKGKIKDISQAMLDRNFKTLGQYFFSLYNKERIRNQYTSREEHYLEEFIIICQTQGIEGINTNEKLPEKKFTGLAKDLYRAIFFQRPLKSQKGLIGKCSFEKNKSRCAVSHPDYEEFRMWSYLNTIKIGTQSEKTLRFLTLEEKLKLVPKFYRKSDFNFEVLAKELVEKGASFGYYKSSKKNEFFYWFNYKPTDSVSACVVSASLENAIGKDWKIKTFEYQTRNTEKNEVTKSVDYKDLWHLLSVATSDTYLYDFAIEKLKLEPKNAKAFSKTKLKKDFASLSLAAIAKILPYLKQGLLYSHAVFMANIENIVDADIWKDEEQQKFIQSKIVELVDNYIVEKSKLELINGLLKIYNTEDKEGRKVYYSKEAESLFEADLRKKLVPFYKANIIIEEHEQEIIFQDLFPILMDQLKKQEFIKIGRLDKQIEAFLEGENEEGQIFCNHTDKLKKLYHPSDIEVFKKKTIKDEWGNEKVVLGSPLTTSIKNPMAMRALHQLRKVLNTLIANDQIDEDTRIHIEMARELNDANKRKGIQDFQNENKKFREEAIKEIKKLYLEECHKDVNPTEDDILRYQLWLEQGKCEIYEEGNNISICDIIGSNPSYDIEHTIPRSISQDNSQMNKTLCSLKFNRSIKKQKMPVELSNYNDILPRIAHWKKEAEELTRQIETISRSIKSAATKVAKDKNIRKRHYLTLKRDYILGKYERFTWEEPKVGFKNSQIPDTGIITKYAQAYLKSYFKRVESVKGGAVAEFRKLWGIQESFIDENWWKHYKDKDRDKHTHHTIDAITIACMPKDKYDLLAHAWRLEDEQDKKAAKVLIEQAKPWKTFKEDIEKIETEILVSHFTPDNVKKQSKSIIKNRGKKVYVLKNELPVNFKNKIEGKDYFKLKFDSKILYKIPKKKEKQTDTFYEELPKNYLNGVEGKDYFKINTTGKTFYKIPIFNQGDTIRGSLHQETTYGAIKLPDIDIETKKPLHTDKGGFILKKDIKGNEIVFFVVRKEISKISENDVQNIVDNVVRKKIENAIANSLITFKIVKKKKVAVIKEGVTIWMREPNIEKGIEGIPIKKVRIITNSVKNPIEIKVHSPLSKSRHKHKQKVYGQNDENYAMALYELDGKREFELINNFNLAKLLKQSQSYYPLHKEKEIKGKKILVPIEKRNNKDVILKRGQQVVFYDKTVENPKDISEIIDFRERIYIIEGLTIQRQKDKKTSKVNEYGIIQLRHFKEARKSEEISKDNFKPDGEFKINENKPTRKMNHNQFTAFVEGIDFKVLPSGKFQKI

SEQ ID NO: 240 - protein, 1459 aa, Flavobacterium columnare
MKFNLGLDIGTNSIGWALVNEDYENKKGKIIAAGSRIIPMTQDILDKFGSGAITETQTALRTDYRSKRKLIQRFLLRRERLHRVLNVLDFLPKHYAESIDFEKYFGKFLPNTEPKLAYNQNQFIFQNSFLEMLKEFQEKHPELLTNNKKIPYDWTIYYLRKKALNQRIEKEELAWLLLQFNQKRGYNQLRDEEEESVPNKQVEFYSLKIIDVVADQPKEGRDKRWYSINLENGWTYRRESKTPLFNWEGKTKDFIVTTDLNQDGSIKKDKEGKEKRSFRAPSEGDWTLLKKKTEKEIYESGKTLGTYIYDALLNTPDLKIKGDFIRTIDRSIYKEELQQIINKQKEYHLELNSSKLYKACLEELYPKNEIYKSALKNKDIAYLFINDILYYQRPLKAPKYNIGKCTYESRTFKKEDKKIREYIPAVAKSHPLFQEFRLWQWIKNLKIYEKLSSDNCTDFFLTNEQDFENLFEFLWNKKEIDHKGILEYLVKTKFPDLKPKQVKTKVKEYRWNYVYDHEKDESKTYPCGETYFLLKNKLDKIYNAQDDFLDKERLYNLWHIIYSVTDKKQYEKALAKFALKNHLDTKSFVNTFKRIPPFKNDYAIYSLKAIKKLLPLMRVGKYWNYDDIDPITKQKIQCIITGEENDTISTLVREKTNHFSNENDFKNLPLWLAGYIVYNSHNESSEIEKWKSPQDIDTFLKKFKQHALRNPIVEQVVTETLRVVRDIWSKKGQGKKDFFNEIHIELGKDLKNPVDKRRKLSSTNTKNESTNTRIKALLIELFTQGVENVKPNSPKHQEILKIFEEGALNSGIEIEEDIIKISNTDQPTKKQLELYILWLEHKYKSPYTGQSIPLSKLFTPNYEIEHIIPRSKYYDDNLSNKVICETEINRLKNNQLGYEFINNHEIREVTLEEGKTIRLLSPEQYWNFVTTYYAKNKAKRENLLLKELPVQMVEKQLNDTRYVSKYVMQLLSKIVRKEDGTDNGINSTNILSISGKMTRALKNDWDLNDVWNDLLLYRFERLNTITKTNLFTTYSEQKQKRMPIVPDQYAKGFHKKRLDHRHHALDAIVIACITRNHINYMNNQNIQGEKLKKNAIEKENYREILQKSRLDIRAQLCEKKYNDNDPTKYNWVFIKPWADFTENTKDILESIIPSFKQNLRIINKTVNYYEKYNENGKKVKVRQIKGDNWAIRKPLHKETISGKVHLSYKTPAKGKILTATRKVLDSSMDFKSIEKITDTGIQKILKNYLEYKKSPELAFSPEGIEELNATITKYNNGFHHKPIYKVRIYEEGVKFPLGNKGNKKSKYVEAEKGTNLFFAIYKDQENNRYFETIPFNDVLETLKKGMSAVPEKNQEENTLVFALSPQDLVFVPTLDEIENPDIVDFKNLTKDQTNRIYKMVSSSGKQCFFIKAEVATSIVNKMEFSTSNKMENSIEGIQIKSNCWKLKLDRLGTITRVIK

SEQ ID NO: 241 - protein, 1389 aa, Oenococcus kitaharae
MARDYSVGLDIGTSSVGWAAIDNKYHLIRAKSKNLIGVRLFDSAVTAEKRRGYRTTRRRLSRRHWRLRLLNDIFAGPLTDFGDENFLARLKYSWVHPQDQSNQAHFAAGLLFDSKEQDKDFYRKYPTIYHLRLALMNDDQKHDLREVYLAIHHLVKYRGHFLIEGDVKADSAFDVHTFADAIQRYAESNNSDENLLGKIDEKKLSAALTDKHGSKSQRAETAETAFDILDLQSKKQIQAILKSVVGNQANLMAIFGLDSSAISKDEQKNYKFSFDDADIDEKIADSEALLSDTEFEFLCDLKAAFDGLTLKMLLGDDKTVSAAMVRRFNEHQKDWEYIKSHIRNAKNAGNGLYEKSKKFDGINAAYLALQSDNEDDRKKAKKIFQDEISSADIPDDVKADFLKKIDDDQFLPIQRTKNNGTIPHQLHRNELEQIIEKQGIYYPFLKDTYQENSHELNKITALINFRVPYYVGPLVEEEQKIADDGKNIPDPTNHWMVRKSNDTITPWNLSQVVDLDKSGRRFIERLTGTDTYLIGEPTLPKNSLLYQKFDVLQELNNIRVSGRRLDIRAKQDAFEHLFKVQKTVSATNLKDFLVQAGYISEDTQIEGLADVNGKNFNNALTTYNYLVSVLGREFVENPSNEELLEEITELQTVFEDKKVLRRQLDQLDGLSDHNREKLSRKHYTGWGRISKKLLTTKIVQNADKIDNQTFDVPRMNQSIIDTLYNTKMNLMEIINNAEDDFGVRAWIDKQNTTDGDEQDVYSLIDELAGPKEIKRGIVQSFRILDDITKAVGYAPKRVYLEFARKTQESHLTNSRKNQLSTLLKNAGLSELVTQVSQYDAAALQNDRLYLYFLQQGKDMYSGEKLNLDNLSNYDIDHIIPQAYTKDNSLDNRVLVSNITNRRKSDSSNYLPALIDKMRPFWSVLSKQGLLSKHKFANLTRTRDFDDMEKERFIARSLVETRQIIKNVASLIDSHFGGETKAVAIRSSLTADMRRYVDIPKNRDINDYHHAFDALLFSTVGQYTENSGLMKKGQLSDSAGNQYNRYIKEWIHAARLNAQSQRVNPFGFVVGSMRNAAPGKLNPETGEITPEENADWSIADLDYLHKVMNFRKITVTRRLKDQKGQLYDESRYPSVLHDAKSKASINFDKHKPVDLYGGFSSAKPAYAALIKFKNKFRLVNVLRQWTYSDKNSEDYILEQIRGKYPKAEMVLSHIPYGQLVKKDGALVTISSATELHNFEQLWLPLADYKLINTLLKTKEDNLVDILHNRLDLPEMTIESAFYKAFDSILSFAFNRYALHQNALVKLQAHRDDFNALNYEDKQQTLERILDALHASPASSDLKKINLSSGFGRLFSPSHFTLADTDEFIFQSVTGLFSTQKTVAQLYQETK

SEQ ID NO: 242 - protein, 1425 aa, Prevotella micans
MIQKIFGLDLGTNSIGSSVRNLELGENLTEQLEFFSSDIFGSSVSKNSNGREYSLAGNRSAHRRSRGLNEARRRKLWATLDLLIEHGLCPMSPDSLMQWRTYDKQKGLYRQYPIEDKDFNAWIMLDFNGDGKPDYSSPYQLRRELVVRQFDFDQPIERYKLGRALYHIAQHRGFKSSKGETIADQEKNEKKPIAEEGADIANEMKASETKLSKGLVAYMQENHLKTVGEAFAKLEDERVRIRNNESYRAIRSQYQDEIKEIFTYQKKLSVESELYERLTSEKKGVGTIFYKRPLRSQRGNVGKCTLERNKPRCPIGRPEFEEFRAWTLINNIKIRETAGEPYKQLPIKLRQELLKDCFLSKVKADFKFEDIRKYIEKRLGLSFSNDDKTINYKDSVSIAACPVTVRMKKLLGENWANCRIDGEKRRQAHGKNNNNEHIVSYTEEDIWHVCYNAEDPEEVSNFARKALHWDENKIKELVRLWTSIPQGYAMLSLKAIRNINRMLLLGLKYSDAVLLAKLPDIVPVSDEDILAITKEFLQLEDKLNQEKQINNIVNSLIANYKSKLEENRFADHNYQYQLGEGDDEDINTQIKSHIGAKLWVQIGADEQTKIFQAVRSKYQDFFKSYKRKFVESPKLGELLVAFLTEKFPNVKSKQWERLYHPSQIAIYRPIPVDNDRSKLRLGNPNIGAIKNPTVMRVLNTLRRRVNQLLDDGVISPDETRVVVETARELNDANTKWALDRYNRIRRDENEKIRKILKELNPTTNSISEQDIDKARYIFEQCETDFYTDGKVPYYNKDIKKYKLWLEQGGQCLYTGQTINLTNLFNPNAFDMEHTIPKSISFDNSDQNLTLCESYYNRFIKKNNIPTDMPNYDKDVTINGKEYTAIKPRLQRWKERVDRLSRNVDFWKGQARRAQDKDRKDECIREKHLWDMELAYWKGKLERFTMTDVTDGFKNSQLVDTRVITRHAVLYLKSIFNHVEVQRGETTAEFRKILGLQSIDEKKDRSLHSHHAIDATMLTVIPSAAKRDRMLELFYKIEETKKALKNYNDNNKTGLNLELKGLEEKLDKEKKDCRVGRRVNDLDRFINENIIVSHHTKDQALTPAHRRLRKRGKIVGGKEHPRWQTGDSLRGEIHKASYYGAITQFAKDANGKVLMKDGQAQIDPTIYYVIRRELKYKRSTQDSGFTNWEDLEKVIVDTDLFGLMKGQFPEGTSFKDACEQGFYMIKKGKNGEGDVKTHRIRHVRCKAVKTALRIKEQTYKSSKDYKQFFYAAVGDLYVMCYYTDGKKRDFKIYSLYDISNHRKSGTEDIPKFITDKKGNHLPLDYKLRTGDMVLLYKDNPEELKDLDQVNLKRRLYKVNRFESEGLIILLTHHLSTTTERGCSIGKIENYQNLPTAIRCGIKTIKFLIMGKHRDFVIRNGNIEFKH

SEQ ID NO: 243 - protein, 1473 aa, Mucilaginibacter paludis
MKNILGLDLGTNSIGWALIEKDTDQKNGNILGTGSRIIPMSQDIKDEFGKGNSISQTADRTKFRSVRRLRERHLLRRERLHRVLNVLGFLPKHYADQIDFKKRLGKLVNETEPKLVYDNKNFIFKKSFEAMLSDFNQHQPLLLADGKKVPFDWTIYYLRKKALTEKIEKEELAWLILNFNQKRGYYQLRGEEEEENPNKMVAFHSLKIVEVIADESQKGKAETWYSLILENGWIYRRSSKTPLYDWKGKQRDFIVTTDLNDDGSIKTDKEGLEKRSFRAPVEDDWTLVKKKTEQEINRSHKTVGTYIYENLLQDPKQKIKGKLVRTIEREFYKDELKMILKNQQKFHPELNDEHLYINCVRELYRNNQAHQTILSKKDFVHLFIDDIIFYQRPLRSQKSSISNCTLEFRKYKNENGTDQTDYLKAIPKSHPLFQEFRLWQWIYNLGIYQKEDDTNVTDELIKNIDGYQDLFDFLNNKKEIRQDILIKFLVEQTGLKGKPLSSVVAKYRWNFVEDKIYPCNETGTQIRTRLAKVENTPEDFLTAETEIKLWHIIYSVNDKADYEKALKTFAEKHNLDTHSFVENFKKFPPFKSEYGSFSEKAIKKLLPLIRLGKYWSWENIDKKTQERIEKILTGEFDEAIKSRVRDKAIHLTEEDHFQGLQLWLASYVVYGRHSEADNLDKWHTVADLEDYLAEFRQHSLRNPIVEQVITETLRVVKDIWLQYGQGAKDFFSEIHIELAREMKNTGDERKRLTSLVTDNENTNLRIKVLLSELLNDGNVENVRPYSPMQQEALKIFEDGVLNSDIEIEDDILKISKMAQPTNTELKRYKLWLEQKYRSPYTGQIIPLNRLFTADYEIEHIIPQSRFFDDSFSNKIICESAVNQLKDKQLGLEFIKNHSGTIVKLGMGKTAKILDVESYNEFVKGNYTKNISKRNKLMLEEIPDKMIERQLNDTRYISKFIISALSNIVRSESNDDGFNSKNVLPGNGKITSRLKQDWGMNDIWNELILPRFERMNKITDSAVFTAWNENNQKFLPIVPLEFSKGFQKKRIDHRHHALDALVIAASTREHINLLNNEHAKSDKRFDLNRKLRKFEKVAYNDPKTGKRIEKEVPTIFLKPWETFTVDAKNSLESIIVSFKQNLRVINRATNYSESYNDENGALRLGKDGNPLKEKIKQSKGDSWAIRKPMHKDFVYGKVHLQNVKLPKDKFITAIRKSLDVTFDLKRIETITDTGIQKILKNYLHSKENKVELAFSPEGIEDMNQHIERYNDGKKHQPIHKVRVFEIGSRFSLGESGNKKTKFVEAAKGTNLFFAVYQDDNKGKRNYETIPLNIVIERQKLGLHSVPTEDAKGGKLLFHLSPNDMVYVPTSEELEDNLASVNIKRLNTAQRKRIYKVEKASGVECYFIRQDIAYLIKNYDAKTKIGELESQNKLQTTMTDDRLKITDVCVKLNIDRLGSIAETFLGNQYGASKKT

SEQ ID NO: 244 - protein, 1365 aa, Filifactor alocis
MTKEYYLGLDVGTNSVGWAVTDSQYNLCKFKKKDMWGIRLFESANTAKDRRLQRGNRRRLERKKQRIDLLQEIFSPEICKIDPTFFIRLNESRLHLEDKSNDFKYPLFIEKDYSDIEYYKEFPTIFHLRKHLIESEEKQDIRLIYLALHNIIKTRGHFLIDGDLQSAKQLRPILDTFLLSLQEEQNLSVSLSENQKDEYEEILKNRSIAKSEKVKKLKNLFEISDELEKEEKKAQSAVIENFCKFIVGNKGDVCKFLRVSKEELEIDSFSFSEGKYEDDIVKNLEEKVPEKVYLFEQMKAMYDWNILVDILETEEYISFAKVKQYEKHKTNLRLLRDIILKYCTKDEYNRMFNDEKEAGSYTAYVGKLKKNNKKYWIEKKRNPEEFYKSLGKLLDKIEPLKEDLEVLTMMIEECKNHTLLPIQKNKDNGVIPHQVHEVELKKILENAKKYYSFLTETDKDGYSVVQKIESIFRFRIPYYVGPLSTRHQEKGSNVWMVRKPGREDRIYPWNMEEIIDFEKSNENFITRMTNKCTYLIGEDVLPKHSLLYSKYMVLNELNNVKVRGKKLPTSLKQKVFEDLFENKSKVTGKNLLEYLQIQDKDIQIDDLSGFDKDFKTSLKSYLDFKKQIFGEEIEKESIQNMIEDIIKWITIYGNDKEMLKRVIRANYSNQLTEEQMKKITGFQYSGWGNFSKMFLKGISGSDVSTGETFDIITAMWETDNNLMQILSKKFTFMDNVEDFNSGKVGKIDKITYDSTVKEMFLSPENKRAVWQTIQVAEEIKKVMGCEPKKIFIEMARGGEKVKKRTKSRKAQLLELYAACEEDCRELIKEIEDRDERDFNSMKLFLYYTQFGKCMYSGDDIDINELIRGNSKWDRDHIYPQSKIKDDSIDNLVLVNKTYNAKKSNELLSEDIQKKMHSFWLSLLNKKLITKSKYDRLTRKGDFTDEELSGFIARQLVETRQSTKAIADIFKQIYSSEVVYVKSSLVSDFRKKPLNYLKSRRVNDYHHAKDAYLNIVVGNVYNKKFTSNPIQWMKKNRDTNYSLNKVFEHDVVINGEVIWEKCTYHEDTNTYDGGTLDRIRKIVERDNILYTEYAYCEKGELFNATIQNKNGNSTVSLKKGLDVKKYGGYFSANTSYFSLIEFEDKKGDRARHIIGVPIYIANMLEHSPSAFLEYCEQKGYQNVRILVEKIKKNSLLIINGYPLRIRGENEVDTSFKRAIQLKLDQKNYELVRNIEKFLEKYVEKKGNYPIDENRDHITHEKMNQLYEVLLSKMKKFNKKGMADPSDRIEKSKPKFIKLEDLIDKINVINKMLNLLRCDNDTKADLSLIELPKNAGSFVVKKNTIGKSKIILVNQSVTGLYENRREL

SEQ ID NO: 245 - protein, 1130 aa, Streptococcus macedonicus
MTNGKILGLDIGIASVGVGIIEAKTGKVVHANSRLFSAANAENNAERRGFRGSRRLNRRKKHRVKRVRDLFEKYGIVTDFRNLNLNPYELRVKGLTEQLTNEELFAALRTISKRRGISYLDDAEDDSTGSTDYAKSIDENRRLLKTKTPGQIQLERLEKYGQLRGNFTVYDENGEAHRLINVFSTSDYEKEARKILETQADYNKKITAEFIDDYVEILTQKRKYYHGPGNEKSRTDYGRFRTDGTTLENIFGILIGKCNFYPDEYRASKASYTAQEYNFLNDLNNLKVPTETGKLSTEQKESLVEFAKNTAILGPAKLLKEIAKILDCKVDEIKGYREDDKGKPDLHTFEPYRKLKFNLDSVNIDYLSREVLDKLADILTLNTEREGIEDAIKRNLPNQFTEEQISEIINVRKSQSTAFNKGWHSFSAKLMNELIPELYATSDEQMTILTRLEKFKVKKKSSKNIKTIDEKEITDEIYNPVVAKSVRQTIKIINAAVKKYGDFDKIVIEMPRDKNADDEKKFINKRNKENKKEKDDALKRAAYLYNGTDKLPDEVFHGNKQLETKIRLWYQQGERCLYSGKPIPIQELVHNSNNFEIDHILPLSLSFDDSLANKVLVYSWTNQEKGQKTPYQVIDSMDAAWSFREMKEYVLKQKGLGKKKRDYLLTTENIDKIEVKKKFIERNLVDTRYASRVVLNSLQSALRELGKDTKVSVVRGQFTSQLRRKWKIDKSRETYHHHAVDALIIAASSQLKLWEKQDNPMFVDYGNNQVVDKQTGEILSVSDNEYKELVFQPPYQGFVNTISSKGFEDEILFSYQVDSKYNRKVSDATIYSTRKAKIGKDKKEETYVLGKIKDIYSQNGFDTFVKKYNKDKTQFLMYQKDPLTWENVIEVILGDYPTTKKSEDGKNDVKCNPFEEYRRENGLICKYSKKGKGTPIKSLKYYDKKLGNCIDITPEESRNKVILQSINPWRADVYFNPETLKYELMGLKYSDLSFEKGTGNYHISQEKYDAIKEKEGIGKKSEFKFTLYRNDLILIKDIASGEQEIYRFLSRTMPNVNHYVELKPYDKEKFDNVQELVEALGEADKVGRCIKSLNKPNISIYKVRTDVLGNKYFVKKEGDKPKLDFKNNKK

SEQ ID NO: 246 - protein, 1367 aa, Streptococcus pyogenes
MDKKYSIGLDIGTNSVGWAVITDDYKVPSKKFKVLGNTDRHSIKKNLIGALLFGSGETAEATRLKRTARRRYTRRKNRICYLQEIFSNEMAKVDDSFFHRLEESFLVEEDKKHERHPIFGNIVDEVAYHEKYPTIYHLRKKLADSTDKADLRLIYLALAHMIKFRGHFLIEGDLNPDNSDVDKLFIQLVQIYNQLFEENPINASRVDAKAILSARLSKSRRLENLIAQLPGEKRNGLFGNLIALSLGLTPNFKSNFDLAEDAKLQLSKDTYDDDLDNLLAQIGDQYADLFLAAKNLSDAILLSDILRVNSEITKAPLSASMIKRYDEHHQDLTLLKALVRQQLPEKYKEIFFDQSKNGYAGYIDGGASQEEFYKFIKPILEKMDGTEELLVKLNREDLLRKQRTFDNGSIPHQIHLGELHAILRRQEDFYPFLKDNREKIEKILTFRIPYYVGPLARGNSRFAWMTRKSEETITPWNFEEVVDKGASAQSFIERMTNFDKNLPNEKVLPKHSLLYEYFTVYNELTKVKYVTEGMRKPAFLSGEQKKAIVDLLFKTNRKVTVKQLKEDYFKKIECFDSVEISGVEDRFNASLGAYHDLLKIIKDKDFLDNEENEDILEDIVLTLTLFEDRGMIEERLKTYAHLFDDKVMKQLKRRRYTGWGRLSRKLINGIRDKQSGKTILDFLKSDGFANRNFMQLIHDDSLTFKEDIQKAQVSGQGHSLHEQIANLAGSPAIKKGILQTVKIVDELVKVMGHKPENIVIEMARENQTTQKGQKNSRERMKRIEEGIKELGSQILKEHPVENTQLQNEKLYLYYLQNGRDMYVDQELDINRLSDYDVDHIVPQSFIKDDSIDNKVLTRSDKNRGKSDNVPSEEVVKKMKNYWRQLLNAKLITQRKFDNLTKAERGGLSELDKAGFIKRQLVETRQITKHVAQILDSRMNTKYDENDKLIREVKVITLKSKLVSDFRKDFQFYKVREINNYHHAHDAYLNAVVGTALIKKYPKLESEFVYGDYKVYDVRKMIAKSEQEIGKATAKYFFYSNIMNFFKTEITLANGEIRKRPLIETNGETGEIVWDKGRDFATVRKVLSMPQVNIVKKTEVQTGGFSKESILPKRNSDKLIARKKDWDPKKYGGFDSPTVAYSVLVVAKVEKGKSKKLKSVKELLGITIMERSSFEKNPIDFLEAKGYKEVKKDLIIKLPKYSLFELENGRKRMLASAGELQKGNELALPSKYVNFLYLASHYEKLKGSPEDNEQKQLFVEQHKHYLDEIIEQISEFSKRVILADANLDKVLSAYNKHRDKPIREQAENIIHLFTLTNLGAPAAFKYFDTTIDRKRYTSTKEVLDATLIHQSITGLYETRIDLSQLGGD

SEQ ID NO: 247 - protein, 1233 aa, Mycoplasma canis
MEKKRKVTLGFDLGIASVGWAIVDSETNQVYKLGSRLFDAPDTNLERRTQRGTRRLLRRRKYRNQKFYNLVKRTEVFGLSSREAIENRFRELSIKYPNIIELKTKALSQEVCPDEIAWILHDYLKNRGYFYDEKETKEDFDQQTVESMPSYKLNEFYKKYGYFKGALSQPTESEMKDNKDLKEAFFFDFSNKEWLKEINYFFNVQKNILSETFIEEFKKIFSFTRDISKGPGSDNMPSPYGIFGEFGDNGQGGRYEHIWDKNIGKCSIFTNEQRAPKYLPSALIFNFLNELANIRLYSTDKKNIQPLWKLSSVDKLNILLNLFNLPISEKKKKLTSTNINDIVKKESIKSIMISVEDIDMIKDEWAGKEPNVYGVGLSGLNIEESAKENKFKFQDLKILNVLINLLDNVGIKFEFKDRNDIIKNLELLDNLYLFLIYQKESNNKDSSIDLFIAKNESLNIENLKLKLKEFLLGAGNEFENHNSKTHSLSKKAIDEILPKLLDNNEGWNLEAIKNYDEEIKSQIEDNSSLMAKQDKKYLNDNFLKDAILPPNVKVTFQQAILIFNKIIQKFSKDFEIDKVVIELAREMTQDQENDALKGIAKAQKSKKSLVEERLEANNIDKSVFNDKYEKLIYKIFLWISQDFKDPYTGAQISVNEIVNNKVEIDHIIPYSLCFDDSSANKVLVHKQSNQEKSNSLPYEYIKQGHSGWNWDEFTKYVKRVFVNNVDSILSKKERLKKSENLLTASYDGYDKLGFLARNLNDTRYATILFRDQLNNYAEHHLIDNKKMFKVIAMNGAVTSFIRKNMSYDNKLRLKDRSDFSHHAYDAAIIALFSNKTKTLYNLIDPSLNGIISKRSEGYWVIEDRYTGEIKELKKEDWTSIKNNVQARKIAKEIEEYLIDLDDEVFFSRKTKRKTNRQLYNETIYGIATKTDEDGITNYYKKEKFSILDDKDIYLRLLREREKFVINQSNPEVIDQIIEIIESYGKENNIPSRDEAINIKYTKNKINYNLYLKQYMRSLTKSLDQFSEEFINQMIANKTFVLYNPTKNTTRKIKFLRLVNDVKINDIRKNQVINKFNGKNNEPKAFYENINSLGAIVFKNSANNFKTLSINTQIAIFGDKNWDIEDFKTYNMEKIEKYKEIYGIDKTYNFHSFIFPGTILLDKQNKEFYYISSIQTVRDIIEIKFLNKIEFKDENKNQDTSKTPKRLMFGIKSIMNNYEQVDISPFGINKKIFE

SEQ ID NO: 248 - protein, 1375 aa, Lactobacillus johnsonii
MTKIKDDYIVGLDIGTDSCGWVAMNSNNDILKLQGKTAIGSRLFEGGKSAAERRLFRTTHRRIKRRRWRLKLLEEFFDPYMAEVDPYFFARLKESGLSPLDKRKTVSSIVFPTSAEDKKFYDDYPTIYHLRYKLMTEDEKFDLREVYLAIHHIIKYRGNFLYNTSVKDFKASKIDVKSSIEKLNELYENLGLDLNVEFNISNTAEIEKVLKDKQIFKRDKVKKIAELFAIKTDNKEQSKRIKDISKQVANAVLGYKTRFDTIALKEISKDELSDWNFKLSDIDADSKFEALMGNLDENEQAILLTIKELFNEVTLNGIVEDGNTLSESMINKYNDHRDDLKLLKEVIENHIDRKKAKELALAYDLYVNNRHGQLLQAKKKLGKIKPRSKEDFYKVVNKNLDDSRASKEIKKKIELDSFMPKQRTNANGVIPYQLQQLELDKIIENQSKYYPFLKEINPVSSHLKEAPYKLDELIRFRVPYYVGPLISPNESTKDIQTKKNQNFAWMIRKEEGRITPWNFDQKVDRIESANKFIKRMTTKDTYLFGEDVLPANSLLYQKFTVLNELNNIRINGKRISVDLKQEIYENLFKKHTTVTVKKLENYLKENHNLVKVEIKGLADEKKFNSGLTTYNRFKNLNIFDNQIDDLKYRNDFEKIIEWSTIFEDKSIYKEKLRSIDWLNEKQINALSNIRLQGWGRLSKKLLAQLHDHNGQTIIEQLWDSQNNFMQIVTQADFKDAIAKANQNLLVATSVEDILNNAYTSPANKKAIRQVIKVVDDIVKAASGKVPKQIAIEFTRDADENPKRSQTRGSKLQKVYKDLSTELASKTIAEELNEAIKDKKLVQDKYYLYFMQLGRDAYTGEPINIDEIQKYDIDHILPQSFIKDDALDNRVLVSRAVNNGKSDNVPVKLFGNEMAANLGMTIRKMWEEWKNIGLISKTKYNNLLTDPDHINKYKSAGFIRRQLVETSQIIKLVSTILQSRYPNTEIITVKAKYNHYLREKFDLYKSREVNDYHHAIDAYLSAICGNLLYQNYPNLRPFFVYGQYKKFSSDPDKEKAIFNKTRKFSFISQLLKNKSENSKEIAKKLKRAYQFKYMLVSRETETRDQEMFKMTVYPRFSHDTVKAPRNLIPKKMGMSPDIYGGYTNNSDAYMVIVRIDKKKGTEYKILGIPTRELVNLKKAEKEDHYKSYLKEILTPRILYNKNGKRDKKITSFEIVKSKIPYKQVIQDGDKKFMLGSSTYVYNAKQLTLSTESMKAITNNFDKDSDENDALIKAYDEILDKVDKYLPLFDINKFREKLHSGREKFIKLSLEDKKDTILKVLEGLHDNAVMTKIPTIGLSTPLGFMQFPNGVILSENAKLIYQSPTGLFKKSVKISDL

SEQ ID NO: 249 - protein, 1053 aa, Staphylococcus aureus
MKRNYILGLDIGITSVGYGIIDYETRDVIDAGVRLFKEANVENNEGRRSKRGARRLKRRRRHRIQRVKKLLFDYNLLTDHSELSGINPYEARVKGLSQKLSEEEFSAALLHLAKRRGVHNVNEVEEDTGNELSTKEQISRNSKALEEKYVAELQLERLKKDGEVRGSINRFKTSDYVKEAKQLLKVQKAYHQLDQSFIDTYIDLLETRRTYYEGPGEGSPFGWKDIKEWYEMLMGHCTYFPEELRSVKYAYNADLYNALNDLNNLVITRDENEKLEYYEKFQIIENVFKQKKKPTLKQIAKEILVNEEDIKGYRVTSTGKPEFTNLKVYHDIKDITARKEIIENAELLDQIAKILTIYQSSEDIQEELTNLNSELTQEEIEQISNLKGYTGTHNLSLKAINLILDELWHTNDNQIAIFNRLKLVPKKVDLSQQKEIPTTLVDDFILSPVVKRSFIQSIKVINAIIKKYGLPNDIIIELAREKNSKDAQKMINEMQKRNRQTNERIEEIIRTTGKENAKYLIEKIKLHDMQEGKCLYSLEAIPLEDLLNNPFNYEVDHIIPRSVSFDNSFNNKVLVKQEENSKKGNRTPFQYLSSSDSKISYETFKKHILNLAKGKGRISKTKKEYLLEERDINRFSVQKDFINRNLVDTRYATRGLMNLLRSYFRVNNLDVKVKSINGGFTSFLRRKWKFKKERNKGYKHHAEDALIIANADFIFKEWKKLDKAKKVMENQMFEEKQAESMPEIETEQEYKEIFITPHQIKHIKDFKDYKYSHRVDKKPNRELINDTLYSTRKDDKGNTLIVNNLNGLYDKDNDKLKKLINKSPEKLLMYHHDPQTYQKLKLIMEQYGDEKNPLYKYYEETGNYLTKYSKKDNGPVIKKIKYYGNKLNAHLDITDDYPNSRNKVVKLSLKPYRFDVYLDNGVYKFVTVKNLDVIKKENYYEVNSKCYEEAKKLKKISNQAEFIASFYNNDLIKINGELYRVIGVNNDLLNRIEVNMIDITYREYLENMNDKRPPRIIKTIASKTQSIKKYSTDILGNLYEVKSKKHPQIIKKG

SEQ ID NO: 250 - protein, 1063 aa, Simonsiella muelleri
MEKFHYVLGLDLGIASVGWAAIEIDKETETSIGLLDCGVRTFERAEVPKTGDSLAKARREARSTRRLIRRRSHRLLRLKRLLKREIFRQPETFKDLPINAWQLRVKGLDSRLNEYEWAAVLLHLVKHRGYLSQRKSEMSETDSKSEMGRLLAGVAENHQLLQQEQYRTPAELALKKFVKHFRNKGGDYAHTFNRLDLQAELHLLFQKQRELGNPFTSPELERQVDDLLMTQRSALQGDAILKMLGHCGFEPEQFKAAKNTFSAERFIWLTKLNNLRIQDQGKERALTADERTKLLDEPYKKSKLTYAQVRKLLSLPQTAIFKGLRYDLEHDKKAENSTLMEMKSYHNIRQTLEKSGLKTEWQSIATQPEILDAIGTAFSIYKTDEDISHELKTCRLPENVLNELLKNINFDGFIQLSLTALRKILPLMEQGYRYDEACTQIYGNHHSGSLQQESKQFLPHIPIDDVRNPVVFRTLTQARKVVNAIIRRYGSPARVHIEMARELGKSKSDRDRIEKQQQKNKKERENAVAKFKEDFPDFVGEPRGKDILKMRLYEQQHGKCLYSGHDIDINRLNEKGYVEIDHALPFSRTWDDSQNNKVLVLGSENQNKRNQTPDEYLDGANNSQRWLEFQARVQTCHFSYGKKQRIQLAKLDDETEKGFLERNLNDTRYIARFMCQFVQENLYLTGKGKRLVFASNGGMTATLRNLWGLRKVREDNDRHHALDAIVVACSTASMQQKITKAFQRHESIEYVDTETGEVKFRIPQPWDFFRQEVMIRVFSDQPCEDLVEKLSARPEALHDNVTPLFVSRAPNRKMSGQGHLETIKSAKRLSEENSMVKKPLTTLKLKDIPEIVGYPSREPQLYAALKTRLETHDDDPIKAFAKPFYKPNKNGELGALVRSVRVKGVQNTGVMVHDGKGIADNATMVRVDVYTKAGKNYLVPVYVWQVAQGILPNRAVTSGKSEADWDLIDESFEFKFSLSRGDLVEMISNKGRIFGYYNGLDRANGSIGIREHDLEKSKGKDGVHRVGVKTATAFNKYHVDPLGKEIHRCSSEPRPTLKIKSKK

SEQ ID NO: 251 - protein, 1509 aa, Psychroflexus torquis
MKRILGLDLGTNSIGWSLIEHDFKNKQGQIEGLGVRIIPMSQEILGKFDAGQSISQTADRTKYRGVRRLYQRDNLRRERLHRVLKILDFLPKHYSESIDFQDKVGQFKPKQEVKLNYRKNEKNKHEFVFMNSFIEMVSEFKNAQPELFYNKGNGEETKIPYDWTLYYLRKKALTQQITKEELAWLILNFNQKRGYYQLRGEDIDEDKNKKYMQLKVNNLIDSGAKVKGKVLYNVIFDNGWKYEKQIVNKDEWEGRTKEFIITTKTLKNGNIKRTYKAVDSEIDWAAIKAKTEQDINKANKTVGEYIYESLLDNPSQKIRGKLVKTIERKFYKEEFEKLLSKQIELQPELFNESLYKACIKELYPRNENHQSNNKKQGFEYLFTEDIIFYQRPLKSQKSNISGCQFEHKIYKQKNKKTGKLELIKEPIKTISRSHPLFQEFRIWQWLQNLKIYNKEKIENGKLEDVTTQLLPNNEAYVTLFDFLNTKKELEQKQFIEYFVKKKLIDKKEKEHFRWNFVEDKKYPFSETRAQFLSRLAKVKGIKNTEDFLNKNTQVGSKENSPFIKRIEQLWHIIYSVSDLKEYEKALEKFAEKHNLEKDSFLKNFKKFPPFVSDYASYSKKAISKLLPIMRMGKYWSESAVPTQVKERSLSIMERVKVLPLKEGYSDKDLADLLSRVSDDDIPKQLIKSFISFKDKNPLKGLNTYQANYLVYGRHSETGDIQHWKTPEDIDRYLNNFKQHSLRNPIVEQVVMETLRVVRDIWEHYGNNEKDFFKEIHVELGREMKSPAGKREKLSQRNTENENTNHRIREVLKELMNDASVEGGVRDYSPSQQEILKLYEEGIYQNPNTNYLKVDEDEILKIRKKNNPTQKEIQRYKLWLEQGYISPYTGKIIPLTKLFTHEYQIEHIIPQSRYYDNSLGNKIICESEVNEDKDNKTAYEYLKVEKGSIVFGHKLLNLDEYEAHVNKYFKKNKTKLKNLLSEDIPEGFINRQLNDSRYISKLVKGLLSNIVRENGEQEATSKNLIPVTGVVTSKLKQDWGLNDKWNEIIAPRFKRLNKLTNSNDFGFWDNDINAFRIQVPDSLIKGFSKKRIDHRHHALDALVVACTSRNHTHYLSALNAENKNYSLRDKLVIKNENGDYTKTFQIPWQGFTIEAKNNLEKTVVSFKKNLRVINKTNNKFWSYKDENGNLNLGKDGKPKKKLRKQTKGYNWAIRKPLHKETVSGIYNINAPKNKIATSVRTLLTEIKNEKHLAKITDLRIRETILPNHLKHYLNNKGEANFSEAFSQGGIEDLNKKITTLNEGKKHQPIYRVKIFEVGSKFSISEDENSAKSKKYVEAAKGTNLFFAIYLDEENKKRNYETIPLNEVITHQKQVAGFPKSERLSVQPDSQKGTFLFTLSPNDLVYVPNNEELENRDLFNLGNLNVEQISRIYKFTDSSDKTCNFIPFQVSKLIFNLKKKEQKKLDVDFIIQNEFGLGSPQSKNQKSIDDVMIKEKCIKLKIDRLGNISKA

SEQ ID NO: 252 - protein, 1112 aa, Staphylococcus simulans
MLVGLKFKQSILFENMENAEDIKESATGSDAISLSDDYYENLSEFLTDEQLNFIESANTFFMGIMLDRILKGATSISAAKVRDYKIFKSQLKLIKDIVYQNKYDKYHEFFVTSKEDMRAYQENPDAKNFGKLSKFDQYLIHSKDQYAKLMKDLKGLVPKEYTEVLNLIDEQKFLVVQNTTDNASIPYQNNVFEAENILRNQQKYYPEITEEMIGKVINLISFRIPYYVGPLTNKNGQSDFAWMIRKSDEQTLPWNFDKVIDKSKSAEKFIRRMTSKCTYLLEEDVLPKHSLLYQEMEVLNELNNVQLRGENEPKHRIHRLDPKVKQFIYHNLFQKKKNVTHKDLITLLQNSEHRNTLNKTSGQKLKVFGTQNDSKFASKLSTYNDMKAILGSVENKRQMIEELVLWITIFEDKAILKQKIGEKYPNITEKQLNQIVKLNYSGWGRLSEKLLTKEVNGRSLIDLMYSTENNFMEIITDKTLGFDCFIKNSNKVKNAKISYKDVAELRTSPALKKGIWNAIKMVREISNLFGAPEKIIIEFATEDQAKGKRQKSRSELWDDLVKKNNLKRNKEFEGLFEELKAYPDLDFSNPKLWLYIHQNGKCMYTKKPIDLERLMSDTNNQLYEIDHILPRTFVKDDSINNKVLVIQSANQKKSGDKMPLEIFDNHVLVPFWKMLYENDLISSSKLSKLMKKEFNDLDKEGFIQRQLVETRQIISHVSDFLTEEYPSTTVVPMKANVVSELRRKFDIPKIRQLNDWHHAVDAYLNGFVYQAARVFYPKVNLFEFNFKWEKVREKWRQLGEFTENNKKREFFLFKRMENYVNEYGEGMISKLIFDLDNFKFNYSRKVESTESAFYKQSAFSPKNTTAQYDSDKNKTAIYKEMKNKRGIVVSYTYVKKDQELIGYGVFNETVFEYVNNADVDMNTRALKIVRKAFPKLDIKKAQYLFSINKGDALLVNGHPFLFVSAYERINGKQLEFDIAMQRKIKQALSPYNNMTEQEKVEFYNQFAEKVIEEFRNSIGLQSRDRKVNLIKNLFNNTEKSNDSMTQSILEVLKMTKVSAERSKELKIRWNGQTPNTFIDTKNNAEIQYKSITGLKTTKPKSIFKLAESKNEL

SEQ ID NO: 253 - protein, 1274 aa, Mycoplasma gallisept
MNINMNNSIKSKPEVTIGLDLGVGSVGWAIVDNETNIIHHLGSRLFSQAKTAEDRRSFRGVRRLIRRRKYKLKRFVNLIWKYNSYFGFKNKEDILNNYQEQQKLHNTVLNLKLEALNAKIDPKALSWILHDYLKNRGHFYEDNRDFNVYPTEELANYFDEFGYYKGIIDSKNDDDDKLEEGLTKYKFSNQHWLEEVKKVLSNQTGLPEKFKEEYESLFSYVRNYSEGPGSINSVSPYGIYHLDEKEGKVVQKYNNIWDKTIGKCSIFPDEYRAPKNSPIAMIFNEINELSTIRSYSIYLTGWFINQEFKKAYLNKLLDLLIKTNSEKPIDARQFKKLREETIAESIGKETLKDVESEEKLEKDDHKWKLKGLKLNTNGKIQYNDLSSLAKFVHKLKQHLKLDFLLEDQYTPLDKINFLQSLYVYLGKHLRYSNRVDSANLKEFSDSSRLFERVLQEQKDGLFKLFEQTDKDDEKILTQTHSLSTKAMLLAITRMTNLDNDEDNQKNNDKGWNFEAIKNFDQKFIDITKTNNNLSLKQDKRYLDDQFINDAILSPGVKRILREATKVFNAILKQFSEEYDVTKVVIELARELSEEKELENTKNYKKLIKKNGDKISEGLKALGIAEDKIEEILKSPTKSYKVLLWLQQDHIDPYSQKEIAFDDILTKTEKTEIDHIIPYSISFDDSSSNKLLVLAESNQAKSNQTPYEFINSGKAEITWEVYEAYCHKFKNGDSSLLDSTQRSKKFAKMMKTDTSSKYDIGFLARNLNDTRYATIVFRDALKDYANNHLVEDKPMFKVVCINGGVTSFLRKNFDPKSWYAKKDRDKNIHHAVDASIISIFSNETKTLFNQLTKFADYKLFKNTDGSWKKIDPKTGVVSEVTDENWKQIRVRNQVSEIAKVIDKYIQDSNIERKARYSRKIENKTNISLFNDTVYSAKKVGYEDQIKRKNLKTLDIHESAEENKNSKVKKQFVYRKLVNVSLLNNDKLADLFAEKEDILMYRANPWVINLAEQIFNEYTENKKIKSQNVFEKYMLDLTKEFPEKFSEAFVKSMIRNKTAIIYNVEKDVVHRIKRLKILSSELKENKWSNVIIRSKNESGTKLSYQDTINSIALMIMRSIDPTAKKQYIRVPLNTLNLHLGDQDFDLHNIDAYLKKPKFVKYLKANEIGDEYKPWRVLTSGTLLIHKKDKKLMYISSFQNLNDLIEIKNLIETEYKENVDSDPKKKKKASQILRSLSVILNDYILLDAKYNFDILGLSKNKIDEILNSKLDLDKIAK

SEQ ID NO: 254 - protein, 1122 aa, Artificial Sequence; identical to SEQ ID NO: 23
  Synthetic sequence

SEQ ID NO: 255 - protein, 1236 aa, Artificial Sequence; identical to SEQ ID NO: 21
  Synthetic sequence

SEQ ID NO: 256 - protein, 1059 aa, Artificial Sequence; identical to SEQ ID NO: 15
  Synthetic sequence

SEQ ID NO: 257 - protein, 1166 aa, Artificial Sequence; identical to SEQ ID NO: 39
  Synthetic sequence

SEQ ID NO: 258 - protein, 1149 aa, Artificial Sequence; identical to SEQ ID NO: 37
  Synthetic sequence

SEQ ID NO: 259 - protein, 1314 aa, Artificial Sequence; identical to SEQ ID NO: 27
  Synthetic sequence

SEQ ID NO: 260 - protein, 1064 aa, Artificial Sequence; identical to SEQ ID NO: 38
  Synthetic sequence

SEQ ID NO: 261 - protein, 1401 aa, Artificial Sequence
  Synthetic sequence
MDKKYSIGLDIGTNSVGWAVITDEYKVPSKKFKVLGNTDRHSIKKNLIGALLFDSGETAEATRLKRTARRRYTRRKNRICYLQEIFSNEMAKVDDSFFHRLEESFLVEEDKKHERHPIFGNIVDEVAYHEKYPTIYHLRKKLVDSTDKADLRLIYLALAHMIKFRGHFLIEGDLNPDNSDVDKLFIQLVQTYNQLFEENPINASGVDAKAILSARLSKSRRLENLIAQLPGEKKNGLFGNLIALSLGLTPNFKSNFDLAEDAKLQLSKDTYDDDLDNLLAQIGDQYADLFLAAKNLSDAILLSDILRVNTEITKAPLSASMIKRYDEHHQDLTLLKALVRQQLPEKYKEIFFDQSKNGYAGYIDGGASQEEFYKFIKPILEKMDGTEELLVKLNREDLLRKQRTFDNGSIPHQIHLGELHAILRRQEDFYPFLKDNREKIEKILTFRIPYYVGPLARGNSRFAWMTRKSEETITPWNFEEVVDKGASAQSFIERMTNFDKNLPNEKVLPKHSLLYEYFTVYNELTKVKYVTEGMRKPAFLSGEQKKAIVDLLFKTNRKVTVKQLKEDYFKKIECFDSVEISGVEDRFNASLGTYHDLLKIIKDKDFLDNEENEDILEDIVLTLTLFEDREMIEERLKTYAHLFDDKVMKQLKRRRYTGWGRLSRKLINGIRDKQSGKTILDFLKSDGFANRNFMQLIHDDSLTFKEDIQKAQVSGQGDSLHEHIANLAGSPAIKKGILQTVKVVDELVKVMGRHKPENIVIEMARENQTTQKGQKNSRERMKRIEEGIKELGSQILKEHPVENTQLQNEKLYLYYLQNGRDMYVDQELDINRLSDYDVDHIVPQSFLKDDSIDNKVLTRSDKNRGKSDNVPSEEVVKKMKNYWRQLLNAKLITQRKFDNLTKAERGGLSELDKAGFIKRQLVETRQITKHVAQILDSRMNTKYDENDKLIREVKVITLKSKLVSDFRKDFQFYKVREINNYHHAHDAYLNAVVGTALIKKYPKLESEFVYGDYKVYDVRKMIAKSEQEIGKATAKYFFYSNIMNFFKTEITLANGEIRKRPLIETNGETGEIVWDKGRDFATVRKVLSMPQVNIVKKTEVQTGGFSKESILPKRNSDKLIARKKDWDPKKYGGFDSPTVAYSVLVVAKVEKGKSKKLKSVKELLGITIMERSSFEKNPIDFLEAKGYKEVKKDLIIKLPKYSLFELENGRKRMLASAGELQKGNELALPSKYVNFLYLASHYEKLKGSPEDNEQKQLFVEQHKHYLDEIIEQISEFSKRVILADANLDKVLSAYNKHRDKPIREQAENIIHLFTLTNLGAPAAFKYFDTTIDRKRYTSTKEVLDATLIHQSITGLYETRIDLSQLGGDAYPYDVPDYASLGSGSPKKKRKVEDPKKKRKVD

SEQ ID NO: 262 - protein, 1368 aa, Artificial Sequence
  Synthetic sequence
MDKKYSIGLAIGTNSVGWAVITDDYKVPSKKLKGLGNTDRHGIKKNLIGALLFDSGETAEATRLKRTARRRYTRRKNRICYLQEIFSNEMAKVDDSFFHRLEESFLVEEDKKHERHPIFGNIVDEVAYHEKYPTIYHLRKKLADSTDKVDLRLIYLALAHMIKFRGHFLIEGDLNPDNSDVDKLFIQLVQTYNQLFEENPINASRVDAKAILSARLSKSRRLENLIAQLPGEKKNGLFGNLIALSLGLTPNFKSNFDLAEDAKLQLSKDTYDDDLDNLLAQIGDQYADLFLAAKNLSDATLLSDILRVNSEITKAPLSASMIKRYDEHHQDLTLLKALVRQQLPEKYKEIFFDQSKNGYAGYIDGGASQEEFYKFIKPILEKMDGTEELLAKLNREDLLRKQRTFDNGSIPYQIHLGELHAILRRQEDFYPFLKDNREKIEKILTFRIPYYVGPLARGNSRFAWMTRKSEETITPWNFEEVVDKGASAQSFIERMTNFDKNLPNEKVLPKHSLLYEYFTVYNELTKVKYVTEGMRKPAFLSGEQKKAIVDLLFKTNRKVTVKQLKEDYFKKIECFDSVEISGVEDRFNASLGTYHDLLKIIKDKDFLDNEENEDILEDIVLTLTLFEDREMIEERLKTYAHLFDDKVMKQLKRRRYTGWGRLSRKLINGIRDKQSGKTILDFLKSDGFANRNFMQLIHDDSLTFKEDIQKAQVSGQGDSLHEHIANLAGSPAIKKGILQTVKVVDELVKVMGRHKPENIVIEMARENQTTQKGQKNSRERMKRIEEGIKELGSDILKEYPVENTQLQNEKLYLYYLQNGRDMYVDQELDINRLSDYDVDHIVPQSFLKDDSIDNKVLTRSDKNRGKSDNVPSEEVVKKMKNYWRQLLNAKLITQRKFDNLTKAERGGLSELDKVGFIKRQLVETRQITKHVAQILDSRMNTKYDENDKLIREVRVITLKSKLVSDFRKDFQFYKVREINNYHHAHDAYLNAVVGTALIKKYPKLESEFVYGDYKVYDVRKMIAKSEQEIGKATAKYFFYSNIMNFFKTEITLANGEIRKRPLIETNGETGEIVWDKGRDFATVRKVLSMPQVNIVKKTEVQTGGFSKESILPKRNSDKLIARKKDWDPKKYGGFDSPTVAYSVLVVAKVEKGKSKKLKSVKELLGITIMERSSFEKDPIDFLEAKGYKEVRKDLIIKLPKYSLFELENGRKRMLASAGELQKGNELALPSKYVNFLYLASHYEKLKGSPEDNEQKQLFVEQHKHYLDEIIEQISEFSKRVILADANLDKVLSAYNKHRDKPIREQAENIIHLFTLTNLGAPAAFKYFDTTIDRKRYTSTKEVLDATLIHQSITGLYETRIDLSQLGGD

SEQ ID NO: 263 - protein, 1368 aa, Artificial Sequence
  Synthetic sequence
MDKKYSIGLDIGTNSVGWAVITDDYKVPSKKLKGLGNTDRHGIKKNLIGALLFDSGETAEATRLKRTARRRYTRRKNRICYLQEIFSNEMAKVDDSFFHRLEESFLVEEDKKHERHPIFGNIVDEVAYHEKYPTIYHLRKKLADSTDKVDLRLIYLALAHMIKFRGHFLIEGDLNPDNSDVDKLFIQLVQTYNQLFEENPINASRVDAKAILSARLSKSRRLENLIAQLPGEKKNGLFGNLIALSLGLTPNFKSNFDLAEDAKLQLSKDTYDDDLDNLLAQIGDQYADLFLAAKNLSDATLLSDILRVNSEITKAPLSASMIKRYDEHHQDLTLLKALVRQQLPEKYKEIFFDQSKNGYAGYIDGGASQEEFYKFIKPILEKMDGTEELLAKLNREDLLRKQRTFDNGSIPYQIHLGELHAILRRQEDFYPFLKDNREKIEKILTFRIPYYVGPLARGNSRFAWMTRKSEETITPWNFEEVVDKGASAQSFIERMTNFDKNLPNEKVLPKHSLLYEYFTVYNELTKVKYVTEGMRKPAFLSGEQKKAIVDLLFKTNRKVTVKQLKEDYFKKIECFDSVEISGVEDRFNASLGTYHDLLKIIKDKDFLDNEENEDILEDIVLTLTLFEDREMIEERLKTYAHLFDDKVMKQLKRRRYTGWGRLSRKLINGIRDKQSGKTILDFLKSDGFANRNFMQLIHDDSLTFKEDIQKAQVSGQGDSLHEHIANLAGSPAIKKGILQTVKVVDELVKVMGRHKPENIVIEMARENQTTQKGQKNSRERMKRIEEGIKELGSDILKEYPVENTQLQNEKLYLYYLQNGRDMYVDQELDINRLSDYDVDAIVPQSFLKDDSIDNKVLTRSDKNRGKSDNVPSEEVVKKMKNYWRQLLNAKLITQRKFDNLTKAERGGLSELDKVGFIKRQLVETRQITKHVAQILDSRMNTKYDENDKLIREVRVITLKSKLVSDFRKDFQFYKVREINNYHHAHDAYLNAVVGTALIKKYPKLESEFVYGDYKVYDVRKMIAKSEQEIGKATAKYFFYSNIMNFFKTEITLANGEIRKRPLIETNGETGEIVWDKGRDFATVRKVLSMPQVNIVKKTEVQTGGFSKESILPKRNSDKLIARKKDWDPKKYGGFDSPTVAYSVLVVAKVEKGKSKKLKSVKELLGITIMERSSFEKDPIDFLEAKGYKEVRKDLIIKLPKYSLFELENGRKRMLASAGELQKGNELALPSKYVNFLYLASHYEKLKGSPEDNEQKQLFVEQHKHYLDEIIEQISEFSKRVILADANLDKVLSAYNKHRDKPIREQAENIIHLFTLTNLGAPAAFKYFDTTIDRKRYTSTKEVLDATLIHQSITGLYETRIDLSQLGGD

SEQ ID NO: 264 - protein, 1368 aa, Artificial Sequence
  Synthetic sequence
MDKKYSIGLAIGTNSVGWAVITDDYKVPSKKLKGLGNTDRHGIKKNLIGALLFDSGETAEATRLKRTARRRYTRRKNRICYLQEIFSNEMAKVDDSFFHRLEESFLVEEDKKHERHPIFGNIVDEVAYHEKYPTIYHLRKKLADSTDKVDLRLIYLALAHMIKFRGHFLIEGDLNPDNSDVDKLFIQLVQTYNQLFEENPINASRVDAKAILSARLSKSRRLENLIAQLPGEKKNGLFGNLIALSLGLTPNFKSNFDLAEDAKLQLSKDTYDDDLDNLLAQIGDQYADLFLAAKNLSDATLLSDILRVNSEITKAPLSASMIKRYDEHHQDLTLLKALVRQQLPEKYKEIFFDQSKNGYAGYIDGGASQEEFYKFIKPILEKMDGTEELLAKLNREDLLRKQRTFDNGSIPYQIHLGELHAILRRQEDFYPFLKDNREKIEKILTFRIPYYVGPLARGNSRFAWMTRKSEETITPWNFEEVVDKGASAQSFIERMTNFDKNLPNEKVLPKHSLLYEYFTVYNELTKVKYVTEGMRKPAFLSGEQKKAIVDLLFKTNRKVTVKQLKEDYFKKIECFDSVEISGVEDRFNASLGTYHDLLKIIKDKDFLDNEENEDILEDIVLTLTLFEDREMIEERLKTYAHLFDDKVMKQLKRRRYTGWGRLSRKLINGIRDKQSGKTILDFLKSDGFANRNFMQLIHDDSLTFKEDIQKAQVSGQGDSLHEHIANLAGSPAIKKGILQTVKVVDELVKVMGRHKPENIVIEMARENQTTQKGQKNSRERMKRIEEGIKELGSDILKEYPVENTQLQNEKLYLYYLQNGRDMYVDQELDINRLSDYDVDAIVPQSFLKDDSIDNKVLTRSDKNRGKSDNVPSEEVVKKMKNYWRQLLNAKLITQRKFDNLTKAERGGLSELDKVGFIKRQLVETRQITKHVAQILDSRMNTKYDENDKLIREVRVITLKSKLVSDFRKDFQFYKVREINNYHHAHDAYLNAVVGTALIKKYPKLESEFVYGDYKVYDVRKMIAKSEQEIGKATAKYFFYSNIMNFFKTEITLANGEIRKRPLIETNGETGEIVWDKGRDFATVRKVLSMPQVNIVKKTEVQTGGFSKESILPKRNSDKLIARKKDWDPKKYGGFDSPTVAYSVLVVAKVEKGKSKKLKSVKELLGITIMERSSFEKDPIDFLEAKGYKEVRKDLIIKLPKYSLFELENGRKRMLASAGELQKGNELALPSKYVNFLYLASHYEKLKGSPEDNEQKQLFVEQHKHYLDEIIEQISEFSKRVILADANLDKVLSAYNKHRDKPIREQAENIIHLFTLTNLGAPAAFKYFDTTIDRKRYTSTKEVLDATLIHQSITGLYETRIDLSQLGGD

SEQ ID NO: 265 - protein, 240 aa, Acetobacter aceti
MANIAENLVFGIDLGIGSCGWAVLNQKAKDENIVALGSWCFDVPETDKERIPTNQIRRANRLLRRVIRRRRNRMAEIRRLFASKGMLDTADPDALAKISADPWEMRAKGLDYQLTPQEFAVALGHIAKRRGFKSAAKRVSTNAPSEDSKMLAALEKTKEQSAQYRTIGEMFARDPAYADRRRNRDGCFDRTMSREDLFKETQILFESQRRLGNFSATSETEQAFIDIAFRQKPMQDSERL

SEQ ID NO: 266 - protein, 400 aa, Acetobacter aceti
SFERFRLLCRLVNLRVTDGLEDRPLTPEELRLACEDAGKTRKLSVKKVRSLIGLRDDQRFTTIPPDQEQHDIAARTGDALTGTATFRAILGESFWRQLLPHPEQLDRAAWIISFHELTDTIISKLATIGLPSEVMELIRKALEDGKFSKFKGAASLSDKAARKLIPFLQEGLTYDKACQKAGYNHAASKFTHYDSIDTKAKFNSLMDDVRDSITNPVARKAISEGMKQVWAMRNQWGLPGAICIELARDVGNSAEKRREIESGIKKNTAQRERERQEAKEHLNQSDISSETLLRYRLWKEQGGRCCYTDQPITPSQLIASDNSVQVDHILPWSRFGDDSYLNKALCTAKANQEKKNRTPWEWIHNQKGVEAWNHFTAAVESRKETRGLKKRNFLLKSSKE

SEQ ID NO: 267 - protein, 376 aa, Acetobacter aceti
YAARVMAEAVRLLYPSGNRAEKGGVKRVFTRPGALTAALRHAWGVESLKKINGKRLNDDRHHALDAAVVAAVSEKEIQKLTKSFQICEQKGLARPMRDVPMPWEGFRHQLETAYADIRVARPERRRARGKGHDATIRQLREEKDGPVVYERRAISDLKLTDLERIKDPERNSAIISSLRTWIEKGKPADYPPQSPKGDEIRKIRVMSRNKPAVSVRGGTADRGEMTRVDVFTKMGKKGKPEWFLVPIYRHQVIDRIQWPQPPNQAAANGKSEKNWPTMGLEHEFRFSLYPRSYVQIVKRDGEIIEGYFAGLDRTVAAFSLLSSSDPTSIQRGIGAKTLESIRKYNVNRFGDISMVEQETRTWHGDVCISPDQPDSA

SEQ ID NO: 268 - protein, 1054 aa, Actinobacillus suis
MKLTPLNYILGLDLGIASVGWAVVEIDEQENPLGLIDVGVRTFDRAEVPKTGESLALARRLARSARRLVKRRADRIKKAKRLLKAENILLSADEHLPNDVWQLRVKGLDQKLERQEWAAVLLHLLKHRGYLSQRKNESKSENKELGALLSGVETNHQILQSAEYRTPAEIAVKKFHVEDGHIRNQRGAYTHTFSRLDLLAEMELLFQRQTDLGNPHTSAKLLENLTALLMWQKPALAGEAILKMLGKCTFEPTEYKAAKNSYSAERFVWLTKLNNLRILEQGAERALTDNERFALLDQPYEKAKFTYAQARTMLALPDEAIFKGVRYQGEDKKAVETKTILMEMKAYHQIRKALENADLKAEWNELKNNSELLDDIGTAFSLHKTDEDICRYLDGKLSESILNALLENLNFDKFIQLSLKALQQILPLMLQGQRYDEAVSAIYGDHYGKKSAEINRLLPTIPADEIRNPVVLRTLTQARKVINAVVRLYGSPARIHIETGREVGKSYQDRKKLEKQQEDNRKQRESAVKKFKEYFPNFVGEPKGKDILKMRLYELQQAKCLYSGKSLELHRLLEKGYVEVDHALPFSRTWDDSFNNKVLVLANENQNKGNLTPYEWLDGKNNSEHWQNFVARVQTSGFSHTKKQRILSHKLDEKGFIERNLNDTRYVARFLCNFIADNMLLTGKGKRKVFASNGQITALLRGRWGLQKVRDDNDRHHALDAVVVACSTVVMQQKITRFVRYEEGNVFSGERIDRETGEIIPLHFPSPWAFFRENVEIRIFSENPKLELENRLPDYPQYNHEFVQPLFVSRMPTRKMTGQGHMETVKSAKRLDEGLSVLKVPLTQLKLSDLERMVNREREVTLYESLKARLEQFGNDPAKAFAEPFHKKGGAVVKAVRVEQTQKSGVLVRDGNGVADNASMVRVDVFTKGGKYFLVPIYTWQVAKGILPNKAVTANVDEIDWLEMDESYQFIFTMYPNDLVKVKLKKEEFFGYYGGLDRATGAIVIKEHDLEKSKGKQGIYRIGVKLALSFEKYQVDELGKNIRPCRPTKRQHVR

SEQ ID NO: 269 - protein, 239 aa, Actinobacillus ureae
MEIRIFSENPKLGLENRLPGYPQYNHEFVQPLFVSRMPTRKMTGKGHMETVKSAKRLDEGLSVLKVPLTQLKLSDLERMVNREREDALYQSLKAHLEQFGNDPAKAFAEPFHKKGGTVVKAVRVEQTQKSGVLVRDGNGVADNTSMVRVDVFTKAGKYFLVPIYKWQVAKRILPNKAVTAGVDEIDWLEMDSSYQFIFTMYANDLVKVKLKKRSILGLLRWFRSCNWGYCYQRTRFREI

SEQ ID NO: 270 - protein, 400 aa, Actinobacillus ureae
MKLTPLNYILGLDLGIASVGWAVVEIDEQENPLGLIDVGVRTFDRAEVAKTGESLALARRLARSSRRLVKRRADRIKKAKRLLKAENLLLSADEILPNDVWQLRVKGLDQKLERQEWAAVLLHILKHRGYLSQRKNESKSENKELGALLSGVATNHQLLQTAEYRTPAEITVKKFQAEENGHGHIRNQRGDYSHTFDRKDLLAEMKLLFQRQAELGNPHTSEKLLENLTTLLLWQKPALAGEAILKMLGKCTFEPAEYKAAKNSYSAERFVWLTKLNNLRILENGIERALTDNERFTLLDQPYEKAKLTYAQARTMLALSDEAIFKGVRYQGEDKKAAEKVALIEMKGYQHIRKALEGAGLKAEWNELKNNSELLDDIGTAFSLYFSISNLPTEIAYFTP

SEQ ID NO: 271 - protein, 1113 aa, Actinomyces georgiae
MSASSQNVERIRYKVGIDVGLRSIGFCAVQVDADDRPVKLLNTVVHVHDAGVSPADAKKADTRKLVSGVARRTRRLYRTRKRRLVDLDRQLDGLGWPLVDPARFADPREPWFAREKLVSGRVDDADERKELLSVALRHIAHHRGWRNPYSTVESLQADAPPSEFLQGLNQRVSEKLGTELDPGLTQGQLVAKLLHRFPNAKIRGPEGILRGKLHQSDNAGELRLICRTQGLDCHITEELVRLVFQAKSPKANKEMRKRIGRDQLPGQGAHIRAEKAHPVFQRFRIVAVLANLRIREAHVDRRLTAEEMRTLTDFLLGLAGSEQPTWEELADNLNIERHQLRGTAKASVDGAPALRFPPIDATTDRIYASKLKWLAEWWRQADEERRGYMVDALSNSGGSEDEPYLDDEIAEMLEQASEEDQAKLDSLHLPGGRASYCLDTLRRLTDAMLGGGLDLFEARKAVFHVDDDWAPPTDPIGAPVGNPPVDRVLKHVARWLEAATGRWGAPQTINIEHVREGLGSEKAARELTRMNDRRRRNNQKLVEEMGEKLGMSGRIRRSDRMRYEAIRRQNCECLYCGQPITYQTMEMDHIVPRAGAASTNSRSNLAAVCRRCNHQKGKLPFAVWAESQDSPAEVRLQDAVQRVRHWLRDAGMGQKELQALRVQVIARLKSKRPDEEFDGRSMESIAWMANELRARVEAQYRGSGTTVRVYRGALTAEARKASGFEGRVNLIGGRGKDRFDRRHHAMDALVIALMNQSVAQTLALRLNMRDSQWLTQSEQTWRQFHGAPGEAARKWEAWDRDMRDASDLFNLALDGGRIPITENVRLRVGNGRVHEDGVIRFKPEYEVKGKTIKGGEARLLGDSLPSEQIDRAETPALWTALTRLPEYDRKSGLPENPDRVIRVNGAVVQATDRIRFFGTPASVAVRGGYAKLGESIHHARIYRINGKTPKYAMIRVYTIDLMRLNHEDIFTAVLKPSTISMRCAEKKLKYAIAEGNAEQIGWLVEGDQLELDAAAYAKGVGADLMREYPMATCWRVAGFPDEAKLRLRPVLLAAEGMGEDAPKFMREVLENQGWRPAVNALLSPGSVRVVRRNVLGEPRFKSSGHLPTTVDLV

SEQ ID NO: 272 - protein, 1101 aa, Actinomyces naeslundii
MWYASLMSAHHLRVGIDVGTHSVGLATLRVDDHGTPIELLSALSHIHDSGVGKEGKKDHDTRKKLSGIARRARRLLHHRRTQLQQLDEVLRDLGFPIPTPGEFLDLNEQTDPYRVWRVRARLVEEKLPEELRGPAISMAVRHIARHRGWRNPYSKVESLLSPAEESPFMKALRERILATTGEVLDDGITPGQAMAQVALTHNISMRGPEGILGKLHQSDNANEIRKICARQGVSPDVCKQLLRAVFKADSPRGSAVSRVAPDPLPGQGSFRRAPKCDPEFQRFRIISIVANLRISETKGENRPLTADERRHVVTFLTEDSQADLTWVDVAEKLGVHRRDLRGTAVHTDDGERSAARPPIDATDRIMRQTKISSLKTWWEEADSEQRGAMIRYLYEDPTDSECAEIIAELPEEDQAKLDSLHLPAGRAAYSRESLTALSDHMLATTDDLHEARKRLFGVDDSWAPPAEAINAPVGNPSVDRTLKIVGRYLSAVESMWGTPEVIHVEHVRDGFTSERMADERDKANRRRYNDNQEAMKKIQRDYGKEGYISRGDIVRLDALELQGCACLYCGTTIGYHTCQLDHIVPQAGPGSNNRRGNLVAVCERCNRSKSNTPFAVWAQKCGIPHVGVKEAIGRVRGWRKQTPNTSSEDLTRLKKEVIARLRRTQEDPEIDERSMESVAWMANELHHRIAAAYPETTVMVYRGSITAAARKAAGIDSRINLIGEKGRKDRIDRRHHAVDASVVALMEASVAKTLAERSSLRGEQRLTGKEQTWKQYTGSTVGAREHFEMWRGHMLHLTELFNERLAEDKVYVTQNIRLRLSDGNAHTVNPSKLVSHRLGDGLTVQQIDRACTPALWCALTREKDFDEKNGLPAREDRAIRVHGHEIKSSDYIQVFSKRKKTDSDRDETPFGAIAVRGGFVEIGPSIHHARIYRVEGKKPVYAMLRVFTHDLLSQRHGDLFSAVIPPQSISMRCAEPKLRKAITTGNATYLGWVVVGDELEINVDSFTKYAIGRFLEDFPNTTRWRICGYDTNSKLTLKPIVLAAEGLENPSSAVNEIVELKGWRVAINVLTKVHPTVVRRDALGRPRYSSRSNLPTSWTIE

SEQ ID NO: 273 - protein, 1181 aa, Actinomyces sp.
MLHCIAVIRVPPSEEPGFFETHADSCALCHHGCMTYAANDKAIRYRVGIDVGLRSIGFCAVEVDDEDHPIRILNSVVHVHDAGTGGPGETESLRKRSGVAARARRRGRAEKQRLKKLDVLLEELGWGVSSNELLDSHAPWHIRKRLVSEYIEDETERRQCLSVAMAHIARHRGWRNSFSKVDTLLLEQAPSDRMQGLKERVEDRTGLQFSEEVTQGELVATLLEHDGDVTIRGFVRKGGKATKVHGVLEGKYMQSDLVAELRQICRTQRVSETTFEKLVLSIFHSKEPAPSAARQRERVGLDELQLALDPAAKQPRAERAHPAFQKFKVVATLANMRIREQSAGERSLTSEELNRVARYLLNHTESESPTWDDVARKLEVPRHRLRGSSRASLETGGGLTYPPVDDTTVRVMSAEVDWLADWWDCANDESRGHMIDAISNGCGSEPDDVEDEEVNELISSATAEDMLKLELLAKKLPSGRVAYSLKTLREVTAAILETGDDLSQAITRLYGVDPGWVPTPAPIEAPVGNPSVDRVLKQVARWLKFASKRWGVPQTVNIEHTREGLKSASLLEEERERWERFEARREIRQKEMYKRLGISGPFRRSDQVRYEILDLQDCACLYCGNEINFQTFEVDHIIPRVDASSDSRRTNLAAVCHSCNSAKGGLAFGQWVKRGDCPSGVSLENAIKRVRSWSKDRLGLTEKAMGKRKSEVISRLKTEMPYEEFDGRSMESVAWMAIELKKRIEGYFNSDRPEGCAAVQVNAYSGRLTACARRAAHVDKRVRLIRLKGDDGHHKNRFDRRNHAMDALVIALMTPAIARTIAVREDRREAQQLTRAFESWKNFLGSEERMQDRWESWIGDVEYACDRLNELIDADKIPVTENLRLRNSGKLHADQPESLKKARRGSKRPRPQRYVLGDALPADVINRVTDPGLWTALVRAPGFDSQLGLPADLNRGLKLRGKRISADFPIDYFPTDSPALAVQGGYVGLEFHHARLYRIIGPKEKVKYALLRVCAIDLCGIDCDDLFEVELKPSSISMRTADAKLKEAMGNGSAKQIGWLVLGDEIQIDPTKFPKQSIGKFLKECGPVSSWRVSALDTPSKITLKPRLLSNEPLLKTSRVGGHESDLVVAECVEKIMKKTGWVVEINALCQSGLIRVIRRNALGEVRTSPKSGLPISLNLR

SEQ ID NO: 274 - protein, 1120 aa, Actinomyces sp.
MNAMKQYNAGIDVGINSVGFAAIEVDSKGLPLNILNNMVVLHDSGVDPGTAKTGATRLANSGTARRTRKLIARRRKRLQKLDRYIEVQGWPLVDFSSLPDPYTPWKIRAKLTQDRLEGEEQGRGLSIALRHMARHRGWRNPYEGVESLHSPKEASKQFKDLKDRVTKVSGVIFDEDATPAEVVCDIGLSPKQRLRSAPSAKYKEGATLADEPVGGKSKEGLLGGKLMQSDNANELRKIGIVQGLSNEKVNEIIDQVFASESPKGQAGKRAKKDELPGQEQYVRALRAHLAFQRFRIVAAVANLRILEAEPKHERLLSQSEKDKVIEFLMSADGDDGVTWSDVAEELGIERECLSGTAKRGADGERPSSFPPTNSTNISIVRSKVKPLIEWWRKASDDEQATLVTALSNADELTDDQPSAETVRQFLSSPDEQSQEKIDKISLPKGRAAYSVNSLERLTRRMLKDSVDLFEARKREFGVDNNWTPTPDSIGEPVGNPAVDRVLKIVNRWLLAVTRKWGPPKVVNIEHVRVGFTSAAQTRKYEEENKTNRERNLAILEELRDKFGTSGKIRREDITRFAALRRQNCQCAYCGEAITFFDCEMDHIVPRKGPGSTNTRNNLVAICERCNKSKSNMPFSLWAQNCDIPGVSVEAVIDRVRTWIKDPELNPKQYNNFKKDVIERLRKTVDDDAIDNRSIESVAWMATELADRIGSHFRTAGANTKVRVYRGWLTSEARKASGFEGKINLIGGRGKTRLDRRHHAMDAATIALMRQSVAQTLVERASIRESDRLRRVVSSSWKDYRGADRDKQFSYGSWLNSMNALAELFNRAIDADGIPVTQNLRLRLGNGEAHDATIRSLEKKRVGASWTIGEIDRASTPQLWLALTRQEDFDQNDGLPANASRELRVKNHWFHAEENVTLFPTKSAAIAVRGGYAEIGNTIHHARLYKLPGKKLTYGMIRVFAIDLLCAWHTDLFSSPLLPESISLRTAETKVRRAVEDGAAMYIGWLVDGDEIVLDPETKAFKSNKIGEYLCEFPGTKRWKVDGFPDKEKLRLRPLQLAGEGLPEDVSAGTEEILGPKGNGWRVAINALFKSSQLVVVRRTALGMVRKLSRRHLPLTTRLRG

SEQ ID NO: 275 - protein, 1095 aa, Actinomyces sp.
MPAHHLRVGIDVGTHSVGLATLRVDDQGTPIELLSALSHIHDSGIGKEGQKDHDTRKKLSGVARRTRHLLRNRRERLQQLDKVLVDLGFPIPKPEEYPDLSERTDPYRVWRVRARLVEETLPEELRGPAISMAVRHIARHRGWRNPYSKVESLLSPAEESSFMKALRKRIMTKTGEVLDDDITPGQAMAQVALTHKIYMRGPEGILGKLHQSDNANEIRKICARQGISSDVCKQLLRAVFKAESPRGSAVSRVAPDPLPGQGSFRRAPKCDPEFQRFRIISIVANLRISETKGENRPLTVDERRQVVAFLMEDSQADLTWVDVAEKLRVSRQALRGTAMLTADGERSAAQPPIDVTDQIMRKTKISALKTWWDKADAERRGAMVRYLYEGLEDSECAEVIAKLPEKDHAKLDSLHLPAGRAAYSRESLTALSDHMLETTNDLHEARKRLFGVDDSWAPPAEPVGAPVGNPSVDRTLKIVARYLSAVESIWGTPEVIHVEHVRDGFTSERTAEERDKANRSRHNDNQKAIEKIQHDYGKEGYISRGDIVRFHALKLQGSACLYCGTTIGYHTCQLDHIVPQAGPGSNNRRGNLVAVCERCNHSKSNTPFAVWAQKCGIPHVGVKEAISRVNGWVEHNHSTSSGDLTRLKKEVIARLRRTQKDPEIDERSMESVAWMANELHHRIAAAYPETTVMVYRGSITAAARKAASIESRINLIGEKGRKDRLDRRHHAVDASVVALMEPSVAKTLAERSSLRGEQRLTGQEQTWKQYTGLTVGARERFEAWRGHMHRLTELFNESLAADEVYVTQNIRLRLSDGSAHTVKASKLVSHRLGDGLTVQQIDRACTPALWCALTREIDFDEKNGLPAREDRVIRVHGQEISSADCIQVFSKRKKTKSDRDEAPFGAIAVRGGFVEIGSSIHHARIYRIEGEKPAYAMLRVFTHDLLSQRHGDLFSAVIPPQSISMRCAATELRQAISEGRATYLGWIVSGDELHIPVETFTTHKIGSFLKDYPNTTRWRICGYDSETMLILKPRILSAEGLNNSSDIAEYVIKNKGWRVAINKLAKVHPTVVRRDALGRPRHSSRSNLPVTWSIE

SEQ ID NO: 276 - protein, 1144 aa, Actinomyces sp.
MSMIDSSENVPGIRYRVGIDVGLKSIGFCAVEVDRNDQPVRMLNSMVFIHDAGVDPNENKAAKSRKLTAGVARRTRRLYRTRHQRLVNLDRVLSKEFGWPLPDLTSFKDPREPWHVRAGLLEGYIADDEKRKEALSIALRHIARHRGWRNPYAKVETLLQPSEPSDFLKGLNDRISEELGRAFPADATPGQLVDTYLAHPDYVGRAGTPKLRGPQGILAGKLHQSDNAQEIRGICDVQRIEPAERDRLIRVVFEAKSPKGSAKERGLVGYDELPGQGRHVRAEKAHPAFQLFRMVSVLANLRIREGREERPLTPDELEDLVDFINQVSLKQEVTWQDLADKLRIERADLRGTAKASFDGSPVLRNPPTDVTTEKIMACKVKWLKEWWKEADDEQRGYMVDAFSNSGGSEDGTDVNDEVAELLEQATEDDQLEFEKISLPQGRAAYSLDSLRRLTDRMLRDGVDLHTARRLEFNVGDDWKPAVEPIGAPTGNPAVDRVLKQVSRWLHAATERWGEPTVINIEHARDGLGSERVARELMRENEKRRKANASAVAEMAAKLKLSGKVHRSDQIRYFALQRQNCQCLYCGAPITYTTAEMDHIVPRADGSSTNDRSNLAAVCRTCNHMKGKIPFAVWASSDKANQGVSLTGALERVNMWQRDSGMSPRQLKQLQREVCARLKSKKPDQEFDGRSMESVAWMAVELRTRIEGFYRSRDEESVPSVGVYRGQLTAEARRASGFESRVNLIGGRGKTRFDRRHHAMDALVIALMNPSVSRTLALRLNMRDAQRLTGVEETWKHFYGKPGEASKRFESWRESMLRGVELFNIALSDNAIPFVENIRLRVGSSVIHDATVHSFCPPKTPDGKQIITKGYGEQHSLGSAMPVELIDRAETPALWTALTRCPDFDPKKGLPENPQRTISVNGTRVGPTELVNFFEFSKSGPKACLKVRGGYVDLSGAIHHARIYRIAGKKTAYAMIRVFQVDLLRLKDHDVFTTPLKPSTISMRTAEPKIREALANGTATQIGWLVEGDELVIDTSKYSGGFIGEVLARYPEATSWRVAGFMTPAKLRIKPILLSKEGFVDETQAALLGVEVTSEAIQKTVDRPGWLPAVNVLFGAGGVRVIRRNCLGEERYHSSASLPVSMTLE

SEQ ID NO: 277 - protein, 1103 aa, Actinomyces sp.
MTKINDDLRYRVGIDVGLKSIGFCAVEVDENDQPLRLLNSMVFVHDAGVDPNENKAAKSRKLTAGVARRTQRGTAQNRRRLAELDRALSEELNWPLPNLEDFEDSYEPWHTRAELVEHYIKDDAERAEALAIAIRHIARHRGWRNPYLSVDSLLTPQEPSKFLRGLNERVTQALGREFPADATPGQLICAYIDSPKYAETQGIRGDSGILSGKLHQFDNVGEIRKICEVQRLDHDVFKLLVRKVFFAKSPRGSAAGLVGHDQIPGQGKYIRAEKAHPDFQLFRIVAVLTNLRIREGKAERCLTPDELRGLVDYILEVQLKQQVTWADLADNLGIERTDLRGTARASFDGSPALRFPPTDVTAEKIMASKVKWLKDWWDKADSERRGFMVDALSNSGGSTGDNDIDDEVAALLEAATEDEQAELEKIQLPQGRAAYSLDSLRRLTKRMLEEGVDLHTARKEEFNVDDDWRPEPEPIEAPVGNPAVDRVLKQVARWLNMATDRWGVPDVINIEHTRDGLGSEKVARELLRESQKRQDLNQKDMDKMIRELGISGKARRSSLIKYQAIQRQNSMCLYCGTEIGFETAEMDHIVPRALSGSTNDRSNLAAVCRACNHQKGAVPFAVWATSGEAHAGVSLEDAIKRVRLWQKGPGMSPKQHKAFQNEVISRLKSRKPDEEFDGRSMESVAWMAVELRTRIDGYYRKVNSDSVPKVGIYRGQLTAEARKASGFENRVNLIGGKGKTRFDRRHHAMDALVIAMMNQSVSQTLALRVNMRESQRITGQEETWKNFYGKPGQASERFEKWREGMLRAVELFNIELAKNAIPFHENVRLRVGSSKVHDDTVRKFIHAKLGEALSVAMIDCAETPALWTALTRLPDFDPKDGLPEDLSREIYIHSRKITADEQLNFFNSPSACLKVRGGYVEIGSSIHHARVYRIDGKKTTYSMVRVFATDLVKMTHEDVFTTPLKPSTISMRTADPKIRKALADGTATQIGWLVEGDELQLETDKYSGGLIGEVLAEYPQLTSWRVAGFYGVTQLRLRPYMLAAEGIPSDASESLRKVIEGKGWLPAINALLSSGCVKVVRRNCLGEPRFNAKSSLPVSQLLR

SEQ ID NO: 278 - protein, 1114 aa, Actinomyces turicensis
MQFHFYMVYVTMKGMNDKDASQQLRYRVGIDVGTHSIGFCAVEVDESGMPIQLLNSMVHKHDSGIDPGGNDTATTRLAEAGVARRTRRLIRRRKKRLQELDAFIEECGWPLVDLATITDARSPWRIRAHLATEHIDDEAEQGKLLSIALRHMARHRGWRSPYARISSLHIQADPSEQLKALAQRVSEKTGISLTADQTPAQLISVYLDVFETGKLRGPEGILGGKLMQSDNANELRRIATVQGLDNDLLKKIIGFVFAAESPKGSAAKRVGKDVLPGAHGLRAEKAHPAFQQFRIVSIVQNLRIKEGTGLRALTSEETEIVVDFLNQAGLTEAPTWEEVADNLEIPRSHLKGTATEGFDGIAPSTRPPFDVTSQKILNGKLKKLSAWWKDADYDHRCAMVNALSNVGSDDEGSLADDDVREFLSDFTDEELEALDKVELPGGRAAYSVDSLEKLTNTMLSEGCDLHSARKIAFGVDDSWTPPAEPIGQPVGNPAVDRVLKQVARWISAATNQWGTPESVNIEHVRDALGSEKASREYQRSLQTRRIRNEKLFAEMRERLDIGGKPRRSELTRYLALQRQNCQCLYCGMPITYTDAEMDHIVPRKGAASTNTRENFAAVCRACNHQKSNLPFAVWAEKTERPGVSVKEAYKRVSDMRIEPGMNGRQMNEFRKAIRLRLTTKHADAEIDGRSLESVAWMANELRHRIEGFYRSAENDVTVRVFRGAVTAEGRRASGFESRVNLIGGKGKTRLDRRHHAMDALTIALMEPGIAQTIALRMNMRESQRVLGEQETWKSFTGGSDTARKRWEHWCEEMLRASELFNVFLAEDRIPICQNKRLRLGSSAVHKAIVQPFEASDKRIVSDAMPVELIDRASTPALWTALTRDPDFDPKEGLPANPSRTIRLHDKRLGPNETVEFFPTAAACLAIRGGYCEIGAGIHHARIFRISGKKTTYAMLRVYQCDLVRFQKENLLTVELPANTISVRTAVPKLREALAHGTAEQIGWLVVGDELKIDLSGFTTGQIETFNETYPQATRWEVTGFPTKTQLRLKPLLIASEGLADDVPDDIVKIVKGPGWWPAIDKLLKIGNVVLYRRDTHGKPRVVSHRSLPLSSKLQ

SEQ ID NO: 279 - protein, 1113 aa, Alcanivorax sp.
MRYRVGLDLGTASVGAAVFSMDEQGNPMELIWHYERLFSEPLVPDMGQLKPKKAARRLARQQRRQIDRRASRLRRIAIVSRRLGIAPGRNDSGVHGNDVPTLRAMAVNERIELGQLRAVLLRMGKKRGYGGTFKAVRKVGEAGEVASGASRLEEEMVALASVQNKDSVTVGEYLAARVEHGLPSKLKVAANNEYYAPEYALFRQYLGLPAIKGRPDCLPNMYALRHQIEHEFERIWATQSQFHDVMKDHGVKEEIRNAIFFQRPLKSPADKVGRCSLQTNLPRAPRAQIAAQNFRIEKQMADLRWGMGRRAEMLNDHQKAVIRELLNQQKELSFRKIYKELERAGCPGPEGKGLNMDRAALGGRDDLSGNTTLAAWRKLGLEDRWQELDEVTQIQVINFLADLGSPEQLDTDDWSCRFMGKNGRPRNFSDEFVAFMNELRMTDGFDRLSKMGFEGGRSSYSIKALKALTEWMIAPHWRETPETHRVDEEAAIRECYPESLATPAQGGRQSKLEPPPLTGNEVVDVALRQVRHTINMMIDDLGSVPAQIVVEMAREMKGGVTRRNDIEKQNKRFASERKKAAQSIEENGKTPTPARILRYQLWIEQGHQCPYCESNISLEQALSGAYTNFEHILPRTLTQIGRKRSELVLAHRECNDEKGNRTPYQAFGHDDRRWRIVEQRANALPKKSSRKTRLLLLKDFEGEALTDESIDEFADRQLHESSWLAKVTTQWLSSLGSDVYVSRGSLTAELRRRWGLDTVIPQVRFESGMPVVDEEGAEITPEEFEKFRLQWEGHRVTREMRTDRRPDKRIDHRHHLVDAIVTALTSRSLYQQYAKAWKVADEKQRHGRVDVKVELPMPILTIRDIALEAVRSVRISHKPDRYPDGRFFEATAYGIAQRLDERSGEKVDWLVSRKSLTDLAPEKKSIDVDKVRANISRIVGEAIRLHISNIFEKRVSKGMTPQQALREPIEFQGNILRKVRCFYSKADDCVRIEHSSRRGHHYKMLLNDGFAYMEVPCKEGILYGVPNLVRPSEAVGIKRAPESGDFIRFYKGDTVKNIKTGRVYTIKQILGDGGGKLILTPVTETKPADLLSAKWGRLKVGGRNIHLLRLCAE

SEQ ID NO: 280 - protein, 1146 aa, Alicyclobacillus hesperidum
MAYRLGLDIGITSVGWAVVALEKDESGLKPVRIQDLGVRIFDKAEDSKTGASLALPRREARSARRRTRRRRHRLWRVKRLLEQHGILSMEQIEALYAQRTSSPDVYALRVAGLDRCLIAEEIARVLIHIAHRRGFQSNRKSEIKDSDAGKLLKAVQENENLMQSKGYRTVAEMLVSEATKTDAEGKLVHGKKHGYVSNVRNKAGEYRHTVSRQAIVDEVRKIFAAQRALGNDVMSEELEDSYLKILCSQRNFDDGPGGDSPYGHGSVSPDGVRQSIYERMVGSCTFETGEKRAPRSSYSFERFQLLTKVVNLRIYRQQEDGGRYPCELTQTERARVIDCAYEQTKITYGKLRKLLDMKDTESFAGLTYGLNRSRNKTEDTVFVEMKFYHEVRKALQRAGVFIQDLSIETLDQIGWILSVWKSDDNRRKKLSTLGLSDNVIEELLPLNGSKFGHLSLKAIRKILPFLEDGYSYDVACELAGYQFQGKTEYVKQRLLPPLGEGEVTNPVVRRALSQAIKVVNAVIRKHGSPESIHIELARELSKNLDERRKIEKAQKENQKNNEQIKDEIREILGSAHVTGRDIVKYKLFKQQQEFCMYSGEKLDVTRLFEPGYAEVDHIIPYGISFDDSYDNKVLVKTEQNRQKGNRTPLEYLRDKPEQKAKFIALVESIPLSQKKKNHLLMDKRAIDLEQEGFRERNLSDTRYITRALMNHIQAWLLFDETASTRSKRVVCVNGAVTAYMRARWGLTKDRDAGDKHHAADAVVVACIGDSLIQRVTKYDKFKRNALADRNRYVQQVSKSEGITQYVDKETGEVFTWESFDERKFLPNEPLEPWPFFRDELLARLSDDPSKNIRAIGLLTYSETEQIDPIFVSRMPTRKVTGAAHKETIRSPRIVKVDDNKGTEIQVVVSKVALTELKLTKDGEIKDYFRPEDDPRLYNTLRERLVQFGGDAKAAFKEPVYKISKDGSVRTPVRKVKIQEKLTLGVPVHGGRGIAENGGMVRIDVFAKGGKYYFVPIYVADVLKRELPNRLATAHKPYSEWRVVDDSYQFKFSLYPNDAVMIKPSREVDITYKDRKEPVGCRIMYFVSANIASASISLRTHDNSGELEGLGIQGLEVFEKYVVGPLGDTHPVYKERRMPFRVERKMN

SEQ ID NO: 281 - protein, 1552 aa, Anaerophaga sp.
MFSQRNNPYCELLQNVKQLYKEKFGKTNQVDNSIIYGFMKRILGLDLGTNSIGWALVENDENDRKGKIIGMGSRIIPMDMSELDNFNKGASISKTAERTRLRMTRRLRERHLLRRARLHRILNIMGFLPEHYRNSIDFIDKKGCFFEGQEPKIAYKPDKNSEQFCFLFTSSFHEMLEDFRKFQPELIQNRKKVPYDWTIYYLRKKALTQKISKEELAWIILNFNTKRGYYHLRGEDEDNQDNKKIKEFRALKVVNVTEREGANSSGKKWYDMELENGWVYSRQSNLPPNLEGKTIELIVSYTLDNNGNIKKDKNGKEKYSLSMPGEEDWNLVKIKTENDLKTSKKSVGEYIYDHLLKNPDQKIRGKLISTIERKFYKEELSRILKTQMNFYEELKNRELYQKCVEELYPNNKSHQQTLLQKDFIHLIVEDIIFYQRPLKSKRAFVNNCPLEYRVYVDKKSGELIKSGVKCIPKSHPLFQEFRLWQYVRNLRIYERERMVNGRLMVNVDVTNELLPDEEHIVRLFDLLNDRKSFKQDDVLRFVGIKSPKDRKRYSWNYPEDKELPGNETRHLILAWLKKVDGVPEDWLDPEKLKALWHLLYSVTDREEIIKGLHSFAKKYELPDTFVEHFKKIPRLEREYGSFSEKAIKKLLPLMRMGKYWKAEEIPADLLEKAQKIIDAEADDRISDEVREKLLHLKDISQLKGLPLWQASYLVYGRHSETGEVVKWRTSEDLEKYILQFKQHSLRNPVVEQVILEALRVVKDIWEHYGEGKEGFFNEIHVEIGRELKNPADKRKKITSQIQENENTNLRIKALLEELFNDPSVKNVRPYSPAQQEILRIYEDGVLNGQKEIPDDILKISKMARPSKSQLVKYKLWLEQKYRSPYTGEIIPLSQLFTSAYEIEHIIPQARYFDDSFSNKVICEAEVNREKGHQLAFEFITKRGGDEIELNFGKKVTILNVEEYQKFVKDHYGRSLRSLSKMRKLLMEDIPDDFIDRQLNDSRYISKVVRNLLSNIVRAEDENSLVSKHLITCTGGVTTRLKHEWGLNDVWNELITPRFVRLNKMGKEKFGEWINKKGKQVFQIQMPLELQKGFNKKRIDHRHHALDALVVACASRSHVNYLNNDSARANASETRYDLRNKLCYKDKTDSNGNYRWKFYKPWESFTEEAKNRLAGTVVSFKSNRRIMTRSSNRYFKWVDTSEGKKKKLVRQIKGDNQAIRKPLHKDTVLGKVSLRKEKKVSLSKAIDLWESIVDKPLKKRIQSLREQGYDKKLLLKYFKDRNNQFNGQDISRVNIYFFDNNLAARRVTLDASFNSEKRIDGITDSGIKKILYAHLQNEKYHGKKDEKGNEISPYELAFSPEGLEEMNANIKKLNGGKPHCPIYKVRLAETIGEKFKLGEKGNKNKKYVEAAKGTNLFFAVYVDEKGVRSFETIPFSVALERRKQKLAVVPEENENKEKLLFYLSPNDLVYVPDEDEKLIDYRQLSINPTRIYKMVSSSGTQCFFIPHFVASPIVQTMELGPNNKSERAWDGQMIKNVCYKLSVDRLGNVKIEK

SEQ ID NO: 282 - protein, 1515 aa, Anaerophaga thermohalophila
MKRILGLDLGTNSIGWALVESDEEQKSGKIQGIGSRIIPMDQNELDNFNKGNTVSQTAERTRLRMVRRLRERHLLRRERLHRVLKEIGFLPEHYLEQIDFTEKPGGFLPGKEPKIAYKPDNFKDKYDFLFQDSYHEMLSDFQDKNPEFIQKRKKVPQDWTIYYLRKKALTAKITKEELAWIILNFNQKRGYYQLRGEDEDVAKNTKKEEFHALKVVKVKEREDSEGASGKWYDIELENGWVYPRQSNIRPDWEGKILELIVTYNLDKDGNIKTDKEGNEKRSFRMPNKDDWTLRKKRTENEIEKSGKTVGEYIYDNLLDAPDLKIRGKLVSTIERKYYRSELEQILTAQKKYHPELSNSELFNKCISNLYPNNDIHRKALLSKDFVHLIINDIIFYQRPLKSKRSTVSNCPLEYRVYVDKVTGEKKKVPLKCIPKSHPLYQEFRLWQYVKNLRLFEKERFENGRLLTNVDVTEQFLPDEDKYVELFEFLNGRKTFKQDDILKFAGIKSAKDRVKYYWNYPQEKEYPGNETRYLIESRLKKIENVPDEWLNYEKIEELWHLLYSVTDKVEIEKGLQSFAAKYQLPDLFVEVFKGFPRMEREYGAFSKKAIKKLLPLMRMGKYWKLENINPDLIEKVQKIIDGEADDNINDGIRERFSEINEMSDLRGMPLWKASYLVYGRHSEAAEVIRWRTSADLDQYIKDFKQHALRNPIVEQVVLEALRVVKDVWNYFGEGREKFFDEIHVEIGRDLKNPADKRQKIANQIQENENTNLRIKALLVELFNDPEVQNVRPYSPVQQQLLKIYEDGVLNAERDIPDDIQKISRMANPTRNQLIRYKLWLEQKYRSPYTGEIIPLNKLFTSEYEVEHIIPRARYFDDSFSNKIISEAEVNRKKDRMLAFEFIKKLGGSTIDLNYGKKVSVLTVEEYQQFVKDHYGINPHSRLKMQKLLMDEIPESFIERQLNDSRYISKMVRNLLSNIVREENENSPVAKQLITCSGSITNTLKQEWGLNDVWNTIITPRFERLNKMGEQKYGEWVNKEGKPVFQIQMPLELQKGFNKKRIDHRHHALDALIVASATRSHVNYLSNEAAKTNAKDTRFDLRNRLCYKEKRGQNRNFTWRFYKPWNTFTEDAKNALNDIVVSFKSNHRVINKSTNRYFKWENLPGGMKKKRLVRQEKGDNWAIRQSLHKDTVLGKVSLRKVKPVSLSVALDSWNNIVDKALKKKIRSLKDQGYDKKLMLKYFKDRRNEYNGENISRVNVYYFDEEMAARRVDLDTSFNSEKRIEGITDSGIKKIIYAHLKNEKYHGQKDDKGKDISPYELAFSPEGIAEMNANIKQLNGGKPHCPIYKVRLAEPVGEKFQLGETGNKTEKLVEVAKGTNLFFGVYANDEGVRSFATVPFYLAVEREKQGLPAVPQENENGDQLLFWLSPNDLVYVPSEEDAHFANPKQIELDNSRIYKMVSSTGTQCFFIPHFVATPIVQTIELGPNNKSERAWDGQMIKKVCYKLSVDRLGNVEIE

SEQ ID NO: 283 - protein, 333 aa, Bacillus cereus
MMNPNNFTKEDFWRTIILYGLNQATYKIALGQSLIRFSEQQRNVVSMNELAEDFFDMYLERLKNGKPQLATPNRQTAMERIINSYNIGRLTRSQAIEKVEREAFNDVIDRFHTVDSLQVPMKFYEKTDKGIVIFDNVFEIFSDNNNFELRNELDARWDLLESAFEIKRTDSQLVNDIRKLYLANGYERTDITKNRSVLNGYQSNVCFYCGELMSDDDVHVDHVIPRQLINHDDIWNLVLSHGFCNQQKSDNLPDVNYIEKLIERNEYFIKSNHPISNKLKERLGNTPRRRRTTIDRIYEHAKLVLAPWKGIYGYNPATDPFYKTFIRNIVLSK

SEQ ID NO: 284 - protein, 1068 aa, Bacillus cereus
MRYVLGLDIGIASCGWAVINQEKERIEDLGVRIFDKAENPKDGKSLAAPRRDARSTRRTLRRKKHRMQRIKILLVKQGLLFKTELNHLYESATEFDVWNLRLDALERKLHPKEFARVLIHLAKRRGFKSNRKETTLSENGQILESISENQQIMEQQNYRTVGEMILKDKKFENHKRNKDGTYIGTVTRQQLQDEIQMIFHTQRLYKNDYATEEFESSYLEIWASQRPYASKDQIEKMIGYCTLEPKEKRTPKASWSFQYFVALQTINNLRLISKDKIEELSFEEKKQIMNLALEKPIVKYIDIRKLLSIPNDFQFNSLSYSADTVDTTLENKRCIELKEYHSINKVYKQVYGKNTPNLLPIDYDTIAYGLTIFKDDKDILEYLQNKYVNAKGKPIKNLAKKTYDDTFIQALLNLNFTKMGHLSFKALKNIIPFLEEGLSYDKACEKAGYNFKGTSYTERTKYLPVIPQNTNPVVHRALSQTRKVINAIIKKYGSPNAIHIETARELSKTFQERKEIDSRYQDNSKKNEHAIHKLKELGNINPSGINIVKFKLWSEQDGRCMYSGKYIEPHRLFEEGYTEVDHILPYSRSLDDSYNNKILTLGTENQRKGNKTPYEYMGNTSIWDEFETRVQSNKKINFKKQQKLLLQNFSYAREQEFIERNLNDTRYATIYLTSLIQQHLIFSESSSKKKVRTVSGIITSHLRSRWGFNKDRKEGHIHHALDAVIVAVTSNHMIQRVTKYYKLKELNKNLQAKQLPFPEPWEGFRLELEARISPNTQQYLKGIHFKNYADVNLSDIKPIFVSRMPKRSITGELHQETIRKFLGYNEKGKVLTAIKTKLEDIPFDANGDFPMYGKETDLYTYNAIKERYLSHEKDKRKSFQEPLYKPTKSGEIGPLIKSIKIMDTRTIVNPVNQGKGVVYNSKIARTDVFKKEDKYYLIPIYTIDLLKNILPHKAITAGKGYEDWTTIDSSFTFLFSLFPNDLIQIVPSKNKTIKARTTVSKKEILLPSLTGYFKGVHSGTAGITVETHDGSVIANVGSKQLLLFEKYQVDVLGHYTKIKEEKRMGMAI

SEQ ID NO: 285 - protein, 1078 aa, Bacillus cereus
MRYVLGLDIGIASCGWAVINQEKERIEDLGVRIFDKAENPKDGKSLAAPRRDARSTRRTLRRKKHRMQRIKVLLVKHGLLSKTELDHLYESATEVDVWNLRLDALERKLYPKEFARILIHLAKRRGFKSNRKETTLSENGQILESISENQQIMEKQNYRTVGEMILKDKKFENHKRNKNGTYVGTVTRQQLQDEIQMIFHAQRLYKNDYATEEFESSYLEIWASQRPYASKDQIEKMIGYCTLEPKEKRAPKASWSFQYFVALQTINNLRLISKDRIEELSFEEKKQIMNLALEKSIVKYIDIRKLLSVPNEFQFNSLSYSADTVDTAVESRKCIELKEYHSINKVYKQIYGENALNLLPKYYDTIAYGLTIFKDDKDILEYLQNKYVNAKGKPISNFANKTYDDTFIQALLNLNFTKMGHLSFKALKNIIPFLEEGLSYDKACEKAGYNFKGTSYTEQTKYLPVIPQNTNPVVHRALSQTRKVINAIIKKYGSPNAIHIETARELSKTFQERKEIDSMYQDNSKKNEHAIHKLKELGNINPSGINIVKFKLWNEQDGRCMYSGKYIEPHRLFEEGYTEVDHILPYSRSLDDSYNNKTLTLGTENQRKGNKIPYEYMGNTSIWNDFETRVQSNKKINKKKQQKLLLQHFSYAREQEFIERNLNDTRYATIYLSSLIQQHLIFSESSRKKKVHTVSGIITSHLRSRWGFNKDRKEGHIHHALDAVIVAVTSDHMIQRVTKYYKLKELNRNLQAKRMPFPEPWEGFRLELEARISPNTQQYLKGLRFKNYADVNLSEIKSIFVSRMPKHSITGELHQETIRKFIGYNEKGKVLTAIKTKLEDIPFDANGDFPMYGKESDLYTYNAIKERYLSHKKDKRKSFQEPLYKPTKSGGIGPLIKSIKIMDTRTIVNPVNQGKGVVYNSKIARTDVFKKEEKYYLIPIYTIDLMKNILPQKAITAGKGYEDWTTIDPSFTFLFSLFPNDLIQIVPSKNKTIKARTTVSKKEVLLPSLTGYFKGVHSGTAGITVETHDGSVIANVGSKQLLLIEKYQVDVLGNYTKIKEEKRIGLTTYNDNKKIAAC

SEQ ID NO: 286 - protein, 1088 aa, Bacillus smithii
MNYKMGLDIGIASVGWAVINLDLKRIEDLGVRIFDKAEHPQNGESLALPRRIARSARRRLRRRKHRLERIRRLLVSENVLTKEEMNLLFKQKKQIDVWQLRVDALERKLNNDELARVLLHLAKRRGFKSNRKSERNSKESSEFLKNIEENQSILAQYRSVGEMIVKDSKFAYHKRNKLDSYSNMIARDDLEREIKLIFEKQREFNNPVCTERLEEKYLNIWSSQRPFASKEDIEKKVGFCTFEPKEKRAPKATYTFQSFIVWEHINKLRLVSPDETRALTEIERNLLYKQAFSKNKMTYYDIRKLLNLSDDIHFKGLLYDPKSSLKQIENIRFLELDSYHKIRKCIENVYGKDGIRMFNETDIDTFGYALTIFKDDEDIVAYLQNEYITKNGKRVSNLANKVYDKSLIDELLNLSFSKFAHLSMKAIRNILPYMEQGEIYSKACELAGYNFTGPKKKEKALLLPVIPNIANPVVMRALTQSRKVVNAIIKKYGSPVSIHIELARDLSHSFDERKKIQKDQTENRKKNETAIKQLIEYELTKNPTGLDIVKFKLWSEQQGRCMYSLKPIELERLLEPGYVEVDHILPYSRSLDDSYANKVLVLTKENREKGNHTPVEYLGLGSERWKKFEKFVLANKQFSKKKKQNLLRLRYEETEEKEFKERNLNDTRYISKFFANFIKEHLKFADGDGGQKVYTINGKITAHLRSRWDFNKNREESDLHHAVDAVIVACATQGMIKKITEFYKAREQNKESAKKKEPIFPQPWPHFADELKARLSKFPQESIEAFALGNYDRKKLESLRPVFVSRMPKRSVTGAAHQETLRRCVGIDEQSGKIQTAVKTKLSDIKLDKDGHFPMYQKESDPRTYEAIRQRLLEHNNDPKKAFQEPLYKPKKNGEPGPVIRTVKIIDTKNKVVHLDGSKTVAYNSNIVRTDVFEKDGKYYCVPVYTMDIMKGTLPNKAIEANKPYSEWKEMTEEYTFQFSLFPNDLVRIVLPREKTIKTSTNEEIIIKDIFAYYKTIDSATGGLELISHDRNFSLRGVGSKTLKRFEKYQVDVLGNIHKVKGEKRVGLAAPTNQKKGKTVDSLQSVSD

SEQ ID NO: 287 - protein, 1069 aa, Bacillus thuringiensis
MNYDIGLRIGITSCGWSIINKDLERIEDLGVRVFEKAENPDGTASAAPRREARKSRRKHRRKKHRIERIKRLIVQHDLLSKKELDSLYLSPFNIDVWNLRVEALERKLDNREFARVLIHLVQRRGFQTIRKSVEIQEEGKLLENVSENERIMKVNGYKTVGEMFSKHEKFTHHKRNKDGSYTSVVTRSLLLKEIKTIFNSQRILGNVFSTQKLESDYLYIWGSQRPTLTYEQLMSMVGNCIYEKKEKRAPKTSWAFQYFSLLQKINKLKVSDDNTLRKLSKEERDIVIELAFKKKNVSFVDIRKALKLNDNTKFNHLTYSHVVETKKVEKATFIELKGYHLIKKQLKDRNVELTQELQPKDYDAIAAASTFFKNDIEFRDYLRNQYLDSNGKRKSNIANKVFEDKVIAAVFELNFSKVCHLSFKSLYKLIPHLEKGLDYKEAILCAGYNFRDENKRDKKLFLPVIQQETNPVVHRALTQARKVINAIIREYGSPNTIRFVVANDLAKTYKQRKELESTLKKNRAENEKIKTKLLSMGIINPTGMDIVKYKLWYEQSGICLYTGRQMELSSLFKPGYSIVNHIIPYNRSFDDTYHNRVLTLTETKYEKGNKIPFEYFGAEETCWNEYEKRVSTSKKIHDKKREKLLIRNFDIEYENEMISNNVFDTHYIGSYFEKYIDEHLQFKKSTKKQKVFSIHGNMVAHLHSRWGFNKNSREIYLNHAVDAAIVAVLTDQLIRNIADYYRRDNILEQKGSLKFPEPWKSFSIELEARISPQVRDLIKKLNLDSYLDVDILHIKPVFISKKPRRKVNGEAHKSTIRSLIGINEIGKTVTCIKTRLEDIPFDENGDFPMYGKDTDKYTYTAIKERYLEFNKDKEKAFSTPLYKLKRNGEPGNQIKSVKIIDTRNIVNKVNQGKGIAYNSNIIRVDVFSRDQKYYVVPIYLRDFIKGSLPNKIITAAKGFMQWPETDNSYTFLFSIFPNDLIKVVPKEGKFIKAKNENKENINLTEILGYFKGLDSSTGAFTLESHDGSLLARGIGTKNLLLIEKYQVDVLGRYNKVGNEERQDIKIQQN

SEQ ID NO: 288 - protein, 206 aa, Bacteroides cellulosilyticus
MKKILGLDLGCNSIGWALVNEAENTEEISSIIKLGVRVNPLTVDEMQNFEKGKSITTNADRTLKRSMRRNLQRYKLRRDTLIEVLKEHGFITDSTLLSEHGNKTTFETYRLRAKAAVEEISLEKFARVLLMINKKRGYKSSRKAKGSEDGVLIDGMDVARKLYEEGLTPGELCLQILEAGKKNLPDFYRSDLQNEFDRIWNFQKLV

SEQ ID NO: 289 - protein, 349 aa, Bacteroides coprosuis
MKKILGLDIGTNSVGWAVVNTNQEGEPSQIEKLGSRIIPMSQDILDKFGQGQTVSSTASRTDYRGIRRLRERSLLRRERLHRVLHILDFLPKHYADSIGWDPRNSKTYGKFLPGTEVKLAWVPTADGHQFLFYSTYLEMLEDLKQTQAQLFETSQTPVPLDWTIYYLRKKALTQPITKHELAWLLLHFNTKRGYYQRRGELEDTPTDKLVEYHALKVVDVEVDPEDQSKKPWYFVHLENGWIYKRQSSEPLDNWKGLVKEFIVTTHLDKEGKPKLDKEGEVRRSFSSPKEDDWTLVKKKTENDLEKSGLTVGAYIYQTLLNKPNQKIRGGLIKHIERNYYVEELEQILR

SEQ ID NO: 290 - protein, 1504 aa, Bacteroides coprosuis
MKKVLGLDIGTNSVGWAVVNQNDKGEFLSIEKIGSRIIPMSQDVMDKFGAGQTESSTAQRTQYRGVRRLRERSLLRRERLHRVLHILHFLPQHYDAAIGWNKKENKTYGKFLPGVEVNIPWVATDQGHQFIFMDSYAEMLKDLKQHQPHLFEKSSTPVPLDWTIYYLRKKALTQAISKEELAWILLNFNQKRGYYQLRGEEVEDNTKREEFYALKVVKVELDKDNTSAKTWYKVHLENGFIYPCPSDTPIDSWVGMVKDFIVTTTLEKDGSEKRTADGEIKRSFRAPKEDDWTLLKKKTESELEKSGKQVGAFIYDTLLSNPDQKIIGGLIKTIERKYYKKELEQILETQQKFIAELSDKKLFQACAEELYPLNDSHRENLLERDFKHLFVQDIIFYHRPLKTKKSLISNCTYEYRTFYKNGEKQISPIKCIAKSNPLFQEFRVWQFVQNLRILQRQRSEGDSIKYNVDVTAEFLKDENDIANLFTWLNERKVIKQDQLLKSYFKLKVNKETKELDYRWNYVDDKNKEYPCNATRTHILSFLEKCKEEKRIEDDRFVYSLWHLLYSVVEPIELRGALAKFAEREHLHPSFVDVFAQFPPLEKEYGSYSEKAIKRLLPLMRMGDYWHEDKIDVKTKQRIQRIIDGEADDDITHRSREKVENLRSITDFKGLPLWKAGYVVYNRHSESGELTKWKTPHELSNYIQNEFKQYSLRNPIVEQIVLETLRVVHDLWVKHGDFSEIHLELGRDIKNSSDKRKRMAERQQENENSRQRVLEMLIDLKKEAAFADLNPYSPSQQEKLRIVEDGVLRSNIEIPKDIEKITKSAKPTSRELTKYRLWLDQKYRSPYTGQPISLAQLFTSKYEIEHVIPQAKYFDDSFTNKVICESEVNKEKGSMLAHEFILKNGGSTVNVGGRQVQVLKNDAYVELINRLYGKNNPVKAKKLLAEDIDEVVGDFSERQLNDTRYISRVVQKLLSNIVREEDEQESTSKHVIGCSGQVTTALKKDWGLNDIWNKIIQPRFERLNEMTATEDYGVWQSPNHFQIRVPEEIQKGFTKKRIDHRHHAMDALVIACATRSHINYISNRSGQDRNAKFETTRTDLRSKLCYKENSSGNNYNYIFNKPWDTFTQDAHRALENIVVSHKQNLRVLTKTNNYTQFINKDGKKDLQKQVKGDHFAVRKPMHQETIYGRVSIRSIKEVALKKALENWKQIVDRTLKDKIRELIGAYGKYDAQTILKYFKDRDYKFNNLKINRVEVYEYDHNCAAVRKSIGDDLTIKQIERITDESIRKILMNHLSNYDDNLKEAFSPEGLMEMNKNIKELNGGKNHQPIYKVRLFEDLGSKFPLGVSHNNPDKYAIAAKGTNLFFGIYEDQEGKRMFDSIPLNIVIDRLKEKKSPVPETYNESKLKFHLSPNDLVYVPTDEEQKQPELVDVDHLSDEQKGRVYKAVSFTGNRAFFVNHRVSKVIHDYVEFGTKNKIENDDDKRSLKHICWKLKVNRLGEITDVKR

SEQ ID NO: 291 - protein, 1509 aa, Bacteroides eggerthii
MKTILGLDLGTNSVGWAVINSVIKEQAERIWIEMAGSRIIPMDAAVLGDFDKGNSISQTSERTRLRGARRLRERQLLRRERLHKVLNILGFLPNHYLEYIDFEKHPGKFLADAEPKLAWVKDEQGKYTFLFQAAFDEMLADFAIHQPSLVSGDKKIPYDWTIYYLRKKALTEMISKEELAWILLNFNQKRGYYQLRGEEEEDNAGKSVEFYALKVLTVEATDEKKGRDVWYNVHLENGWIYRRSSSVPLDWEGQVKEFIVTTDLNPDGTPKLDKYGEVKRSFRAPKEDDWMLIKKRTEADIANTHKTVGAYIYDTLLQKPQQKIIGKLVKTVERKLYRDELSLILQKQCAFHAELQDRALYARCVEALYPSNEVRRKNIANRDFVYLLMDDILFYQRPLKTKKSLIANCPYEENEYVDRETGEIKKTPLKCIAKSHPLFQEFRLWNFLSNIRIYQKEKEINGTLHLDVDVTAEFLKTEDDYVALFDWLNSRKEIEQKTFLKYPKFGLKKEISNYRWNYVEDKQYPCNETRHAILSSLEKANVCIDFLSNEKEVALWHILYSVSDKQEIEKALRTFAAKNGLDESFVEAFKKFPPFKSEYGAYSAKAIKKMLPLMRCGKYWDVSSIDDTTKERIKKIVTGEYDERISVKVRDKVMNLSDISCFRRLPLWLACYIVYNRHSEDKEAVKWESPADIDAYLASFKQHSLRNPIVEQVITETLRVVRDIWKQVGRIDEIHIELGREMKNPADKRKRMTAQILENENANLRIKALLAEFMNPEYEIENVRPYSPSQQEILRIYEDTVLHAEDQLPEEIDAILKKFNSSKVPTKSEFLRYKLWLEQKYRSPYTGELIPLGKLFTAAYEIEHVIPQSRYFDDSFSNKVICESAVNKLKDNQLGYEFIKNHHGQKVEVGFGKSVEIFSVDSYERFVKEQYAKSAVKMKKLLMDDIPEQFIERQLNDSRYISKVIKGLLSNIVREKNDSGEYEPEAVSKNIVVCTGSVTDRLKRDWGMNDVWNSIVYPRFERLNSLTDTQSFGHWENKSGKKVFQTELPLEYQKGFSKKRIDHRHHAMDAIVIACATRNHVNYLSNESASRNAKISRYDLQRLLCDKNRTDDNGNYKWVIKKPWDTFTQDAREVLSKIVVSLKQNLRIINKTTNVYRHLDATGNRVYEKQKTGDSWAIRKPMHKDTVFGAVNLRKVKVVRLSVALDTPAMIVDKRVKNKVFELLSYKYDKKRIEKYFKENAFLWKELDLAKVAVYYFTEATTEPLVAVRKPLDSTFNEKKIKESVTDTGIQKILLNHLCTKEGKPDLAFSAEGIEEMNRNLLQLNNGKSHQPIYKVRVYEPRGNKFSVGVLGNKGTKWVEAAKGTNLFFAIYITEDGKRTYETIPLNVVIEREKQGLVPVPDRNKKGDKLLFWLSPNDLVYLPTEEEREFGRINEPIDRGRIYKMVSCTGNEGHFIPANVANPIVPVIELGSNNKAQRAWTNEMIKDICIPIKVDRLGHIIEVKYRIDE

SEQ ID NO: 292 - protein, 1526 aa, Bacteroides faecis
MKKILGLDLGTNSIGWAVLNAADDNSLKYIEAAGSRIIPMDAAILGDFDRGNSISQTAERTRIRGMRHLRERYLLRRARLHRILNLLGFLPFHYAQDIDRYGNFSADMEPKIAWCKNLEGELEFIFIESFNEMLEDFRKNQPELVADNKKVPYDWVIYYLRKKALEKKISKEELAWILLNFNQKRGYYQLRGEDDDESMKTAKTRQYFDKQIIKNIIDTNQTYKGQRILIVELQNGDKGKIFKKEIPDWIGQEKNIIVTVDIDKDGNDKYEESGSLSCRFKIPTDAEWESEWKLIKMKTQKDLDESNKTVGTYIYDSILQNPTQKVRGKLVRTIERKYYKAELKQILEKQTEFHSELQDKDLYIECLNELYSNNDTHRNAITDRDFVYLFMNDILFYQRPLKSKKSLIDNCPYERNIYIDKETGEIKYSPIKCIAKSHPLFQEFRLWKFISSIRIYQRESVVEVVDKQLDLFSSQSTSVQKLVTDVDVTDKFLTCENDYVALFEWLNKKKIIDQKEFLKYRPFGLKGDIDNYRWNYVEDKSYPCNETHAMILTYFAKAGISEDILTKEMEEALWHILYSVEDRQEITKALRTFASKYHLSDSFVKVFSNIPPFKKEYGSYSAKAIKKLLSLMRMGKYWSEDAIDVNTRERIDKIVTGEYDEKIRDRVREKTIRLNDIRHFRALPDWLACYVVYDRHSETREITEWKSPEEIDEYIRNFKQHSLRNPIVEQVITETLRTVRDIWKQVGCIDEIHVELGREMKNPADKRKRITSQIIENENANLRVKALLTEFVNSEFEIENVRPYSLSQQDILRIYEDGVLNSVAEVPGDIAGILKKFNENDAKKRPTTSEILRYKLWLEQKYRSPYTGEMIPLSKLFTSAYEIEHVIPQSRYFDDSFSNKVICEAEVNKLKDNALGYEFIKKHHGEKVELGFGKIVEIFSVSVYEQFVKDNYSRNRGKMKKLLMDEIPEQFIERQLNDSRYISKVVKTLLSNVVREKAEQEAVSKNVIVCTGGVTDRLKKDWGINDVWNKIVLPRFLRLNELTNSTNFTAKNAAGNEIPAMPLELQKGFNKKRIDHRHHAMDAIVIACANRNIVNYLNNESASRKAKISRHDLQAILCDKVRTDDKGNYQWRVKKPWDTFTQDVYVALENIIVSFKQNLRVINKTSNYYWHYENGKKVLVKQVKGDSWAIRKPMHKDTVFGEVNLRKVKSVSLNEALKNPQFIVEKDLKRQLLSLLQQNFDIKKIKKYFEEHKDIWSDISLSKMNIYYFTKETKDRYFATRKPLDASFDKKKIESCITDTGIQQILLRHLELKENDPERAFSPDGIDEMNRNIIQLNKGKGHHPIAKVRVYEKADKFEVGQRGNKSSKFVEAAKGTNLFFAVYETEYPDEKTNSIVRKRNYATIPLNIAIERQKRGLSTAPEDEKGNVPSFVLSPNDLVYLPTSEDIVNGHITQPIDKSRIYKMVSSSGSQCFFIKHNIANIIVDKYEFSPLNKMERAISNEMIKEICIPVKVDRLGNIVKLGKSE

SEQ ID NO: 293 - protein, 1509 aa, Bacteroides fluxus
MKTILGLDLGTNSVGWAVINSVIKEQAERIWIEMAGSRIIPMDAAVLGDFDKGNSISQTSERTRLRGVRRLRERQLLRRERLHKVLNILGFLPNHYLEYIDFEKHPGKFLSDAEPKLPWVKDEQGKYTFLFQAAFDEMLADFAIHQPSLVSGDKKIPYDWTIYYLRKKALTEMISKEELAWILLNFNQKRGYYQLRGEEEEDNAGKSVEFYALKVLTVEATDEKKGRDVWYNVHLENGWIYRRSSSVPLDWEGQIKEFIVTTDLNPDSTPKLDKYGEVKRSFRAPKEDDWMLIKKRTEADIANTHKTVGAYIYDTLLQKPQQKIIGKLVKTVERKLYRDELSLILQKQCAFHAELQDRTLYARCVEALYPNNEVQRRNIANRDFVYLLMDDVLFYQRPLKTKKSLIANCPYEENEYVDRETGEIKKAPLKCIAKSHPLFQEFRLWNFLSNIRIYQKEKEINGTLHLDVDVTAEFLKTEDDYVALFDWLNSRKEIEQKTFLKYPKFGLKKEISNYRWNYVEDKQYPCNETRHAILSRLEKANVCIDFLSNEKEVALWHILYSVSDKQEIEKALRTFAAKNGLDESFVEAFKKFPPFKSEYGAYSAKAIKKLLPLMRCGKYWDVSSIDDTTKERIKKIVAGEYDERIAVKVRDKVMNLSDISCFKRLPLWLACYIVYNRHSEDKEAVKWESPADIDAYLASFKQHSLRNPIVEQVITETLRVVRDIWKQVGRIDEIHIELGREMKNPADKRKRMTAQILENENANLRIKALLAEFMNPEYEIENVRPYSPSQQEILRIYEDMVLHAEDQLPEEIDAILKKFNSSKVPTKSEFLRYKLWLEQKYRSPYTGELIPLGKLFTAAYEIEHVIPQSRYFDDSFSNKVICESAVNKLKDNQLGYEFIKNHHGQKVEVGFGKSVEIFSVDSYERFVKEQYAKSAVKMKKMLMDDIPEQFIERQLNDSRYISKVIKGLLSNIVREKNDSGEYEPEAVSKNIVVCTGSVTDRLKRDWGMNDVWNSIVYPRFERLNSLTDTQSFGHWENKSGKKVFQTELPLEYQKGFSKKRIDHRHHAMDAIVIACATRNHVNYLSNESASRNAKISRYDLQRLLCDKSRTDDNGNYKWVIKKPWDTFTQDAREVLSKIVVSLKQNLRIINKTTNVYRHLDATGNRVYEKQKTGDSWAIRKPMHKDTVFGAVNLRKVKVVRLSVALDAPTMIVDKRVKNKVFELLSYKYDKKRIEKYFKENAVLWKELDLARVAVYYFTEATTEPLVAVRKPLDSTFNEKKIKESVTDTGIQKILLNHLCTKEGKPDLAFSAEGIEEMNRNLLQLNNGKRHQPIYKVRVYEPRGNKFSVGVLGNKGTKWVEAAKGTNLFFAIYITEDGKRTYETIPLNMVIEREKQGLAPVPDKNEKGDKLLFWLSPNDLVYLPTEEELEFGRINEPIDRGRIYKMVSSSGNQCFFIPQSISNAIIPTKELGANNKAERSWDGAMIKNICIPVKVDRLGRIIEVKYRINE

SEQ ID NO: 294 - protein, 1436 aa, Bacteroides fragilis; identical to SEQ ID NO: 160

SEQ ID NO: 295 - protein, 1512 aa, Bacteroides nordii
MKNILGLDLGTNSIGWAVINSEEDGPIVKKRIELAGSRIIPMDAAVLGNFDSGVTKSQTAERTSFRSIRRLRERQLLRRERLHKVLQILGFLPEHYVNDIDFENHPGKIKRNTEPKLPWRKNSMGQFEFIFQDSFEAMLTDFATHQPVFVSEGKKVPYDWTLYYLRKKALTEGISKEELAWLILNFNQKRGYYQLRGEEEEEQSNKLVEFYALRVVKVEATDDKKGKDTWYNVHLENGWIYRRTSNIPLDWEGKVKEFIVTTDLNEDGTPKLDKYGEVKRSFRAPKEDDWTLIKKKTESDIANSHKTVGCYIYDALLQNPHQKIKGRLVRTVERKFYKEELRLILEKQLSFHPELQDRDLYRACIDALYVSNEAHKNNISGRDFVYLFIDDIIFYQRPLKTKKSLIDNCPYEENQYMDRETGEVKQAPIKCIAKSHPLFQEFRLWQFISNIRIYQRERVLDDGKLETDVDVTPDFLKTEDDYTTLFEWFNDRKEVDQKAFLKNPQFGLKKTFTEYRWNYVEDKSYPCNETRNAILNGLQKAGVSADFLSREVEEALWHILYSVEDKIEIESALRKFASKHDLDDRFADVFKKLPPFKKEYGAYSAKAIKKLLPLMRIGKYWELSNIDDKTKERIDKIITGEWDENIHDRVREKAIKLSDITDFKGLPLWLSCYVVYNRHSEARAIAKWESPEDIDSYLRLFRQHSLRNPIVEQVITETLRTVRDIWKRVGQIDEIHVELGREIKNPADKRAKMTAQIVENENTNLRIKALLAEFINSEYEIENVRPYSSNQQEKLKIYEDTVLNGVKEIPEDINTILKKFRESDLKKRPTKSDFLHYKLWLEQKYCSPYTGRIIPLGKLFTSAYEIEHIIPQAHYFDDSFSNKVICEAEVNGLKDKKLGYEFIKHNPGKMVEIGFGKPPVRIFSVEEYERFVKENYSGIKNKMNKLLMDDIPETFIERQLNDSRYISKVVKSLLSNIVREKDSNGEYEPEAISKNVIVCTGSVTDRLKRDWGVNDVWNSIIYPRFERLNELTGSQQFGCWENKEGKRVFQTAVPLEMQKGFSKKRIDHRHHAMDAIVIACATRNHINYLSNESASKKAKISRTDLQRLLCTKCRTDDNGNYKWIVKKPWPAFTQDIRKALENITVSFKQNLRVINKTTNYYVHFDESGKKVLEKQINGDSWAIRKPMHKDTVFGKVNLQKVKEVRLSLALDTPKMIVDKKLKEKVLQLYSYKYDKKRIDKYFKENASLWKDLNLSKVAVYYFTNDSTEPLVAVRKPLDTSFNAKKIKESVTDTGIQKILLNHLSNNQDDPNLAFSPDGIDKMNKNLTALNDGKYHQPIYKVRVCEPQGNKFSVGTSGNKTSKYVEAAKGTNLFFAVYQTEDGKRSYETIPLNVVIEREKLGWTPVPENNNNGDKLLFWLSPNDLVYVPTADELNNGMRLDNMDKGRIYKMISCSGPQCFFIPQNVSNAIIPVIELGANNKAEKSWNNEMIKVVCVPIRVDRLGCITQINNQK

SEQ ID NO: 296 - protein, 779 aa, Bacteroides oleiciplenus
MKEGNQYDVACEYAGYRHSKSSLTREEIDNKVLKNRLEILPKNSLRNPVVEKILNQMVNVVNAVIDTYGKPDEIRVELARELKKGAKEREELAKSIAQNTREHEAIRQLLQTEFGMMHVTRNDIIRYKLYEELKDNGYKTLYSDQYIPREKVFSKEIDIEHIIPQARLFDDSLSNKTLEYRAVNIEKGNKTAYDFVKEKYGNDGLRRYLNHCEALFKDKKTKLKKLKMEDQDIPDGFIDRDLRNTQYIAKKALSMLSEISRRVVATTGSITDELRKDWQLVDIMKELNLPKYEALGFVETFKDKDGRIIKKIKDWSKRNDHRHHAMDALTVAFTKDVFIQYFNNKNAFWMSGSKEHANITAIKNKYFEKGKALAPIPLELFRTEAKHHLENILVSIKAKNKVVTNNINRTKKKNGENLKLQQTPRGQLHLESIYGSYRQCIIRDEKVNASFDASKIANVSKSAYRNALLKRLEAYDNDPKKAFTGKNSLDKNPVYLDENKMEKVPDRVKIVEFETVYTIRKPIDPKLSIDKVVDARIRTLLKKRLEEYGGDAQRAFSNIEENPIWLNKEKGISVKRVAIRGISNAQALHDKKDKDGNPILDKEGKGIPTDFVNTSNNHHVAIYRKPVVDKMGQVILDENGSPRYELGEDVISFFEAVARVNLRQPVVDKDYKRSEGWQFLFSMKQNEYFVFPNEKTGFNPKEIDLLNPENYALISPNLFRVQKIGLNDYTFRHHLETSIQNNSNELKFITWIRCGKNGINGVIKVRVNHIGQIVSMGEY

SEQ ID NO: 297 - protein, 653 aa, Bacteroides oleiciplenus
MKKILGLDLGSSSIGWALVNEGANDEEKSSIIKLGVRVNPLTVDEAQNFEKGKSITTNADRTLKRGMRRNLQRYKQRREALVEVLKKHEFITAGTLMSEQGNKTTFETYRLRAKAVEEEISLEEFARVLLMINKKRGYKSSRKAKGDEDGVLIDGMDVAKKLYDEDLNPGELCLQLLEAGKKTLPDFYRSDLQDEFDKIWNFQKQFNPESFCDTAKEEVRGKNRTQTWTILSKYFVWTEGDSVWNNEEARTEERIKEYKLVGIKRTTKGYEQKLENYRWRVQALSEQLNPEIIAIVLQEINGQISASSGYLGAISDRSKELFFNHQTVGQSLMSELDKNPNGSLRNKVFYRQDYLDEFNTIWEKQSLYHKELTVELKKEIRDIIIFYQRRLKSQKGLISTCEFEQREIIVEKDGKRKTKIIGCKVIPRSHPLFQEFKIWQTLNDVEVYVADRRTKRKQDRKSTTLFSDTEDILLVEGKRYLYQEEKELLAKELFVRENMKKAEVLKLLFEDPKELDLNFKQIDGNRTGFALFSAYSKMIEKYGYESVNFKNSADEIIEKLQIIFADLGWNTELFSIDLSKDDKELEKQPYFRLWHLLYSFEGDNTPTGNGKLIEALMRLCSVEKEYASVLANVSFQEDYGSLSAKAIKKYYLI

SEQ ID NO: 298 - protein, 1436 aa, Bacteroides sp.
MKRILGLDLGTNSIGWALVDEAENKDERSSIVKLGVRVNPLTVDELTNFEKGKSITTNADRTLKRGMRRNLQRYKLRRETLMEVLKEHKLITEDTILSENGNRTTFETYRLRAKAATEKISLEEFARVLLMINKKRGYKSCRKAKGAEEGTLIDGMDIARELYNNNLTPGELCLQLLDAGKKYLPDFYRSDLQNELDRIWEKQKEYYPEILTEVLKEELRGKKRDAVWAICAKSFVWEEYYTEWNKEKGKTEQQEREHKLEGIYSKRKRDEAKRENLQWRVNGLKEKLSLEQLVIVLQEMNIQINNSSGYLGAISDRSKELYFNKQTVGQYQMEMLDKNPNASLRNMVFYRQDYLDEFNTLWEKQAEYHKELTGELKKEIRDIVIFYQRRLKSQKGLVGFCEFESRQIEVEIDGKKKIKTVGNRVIPRSSPLFQEFKIWQILNNIEVTVVGKKGKRRKQKDNSPTLFDGLDDTEQLELNGSRYLYQEEKELLAQELFVRDKMTKSDVLKLLFDNPQELDLNFKTIDGNKTGYTLFQAYSKMIEMSGHEPVDFKKTVEKVVEHVKAVFDLLNWNTDILGFNSNEELDNQSYYKLWHLLYSFEGDNTPTGNARLVQKITELYGFEKEYAIILANVTFQDDYGSLSAKAIHKILPHLKEGNRYDVACAYAGYKHSESSLTKEEIANKALKDRLTLLPKNNLRNPVVEKILNQMVNVINAIIDTYGKPDEIRVELARELKKNAKEREELTKFIAETTRKHEEFKILLQSEFGLTNVSRTDILRYKLYKELESCGYKTLYSNTYIPREKLFSKEFDIEHIIPQARLFDDSFSNKTLEARSINLEKGNKTAYDFVKEKFGESGADNSLDHYLNNIEDLFKSGKISKTKYNKLKMAEQDIPDGFINRDLRNTQYIAKKALSMLNEISRRVVATSGTITDKLRQDWQLVDVMKELNWEKYKALGLVEYFEDKDGRQIGRIKDWTKRNDHRHHAMDALTVAFTKDIFIQYFNNKNASLNSNTNEYAIKNKYFQNGRAIAPIPLREFRVEAKKHLENTLISIKAKNKVVTGNINKTKKRGGVNKYLQQTPRGQLHLETIYGSGKQYLTKEEKVNASFDMKKIATVSKSAYRDVLLKRLHENDNDPKKAFTGKNSLDKQPIWLDKEQTRKVPEKVKTVTLETIYTVRKEISPDLKVDKVIDAGVRKILTGRLNEYGNDAKKAFSNLDENPIWLNKEKGISIKRVTISGISNAQSLHVKKDKDGKPILDEDSRNIPVDFVNTGNNHHVAVYRRPVIDKRGQLVIDEAGNPKYELEEVVVSFFEAVTRANLGQPIIDKDYKTSEGWQFLFSMKQNEYFVFPNEKTGFNPKEIDLLDAENYGVISPNLFRVQKFAHKNYVFRHHLETTIKDTSSILKGITWIDFRSSKGLDAIVKVRVNHIGQIVSVGEY

SEQ ID NO: 299 - protein, 1510 aa, Bacteroides sp.
MKRILGLDLGTNSIGWALVDSEEQRILGMGSRIIPMDQGVLDTFSGGNPVETQTAARTAYRGTRRLRERALLRRERLIRVLNMMKFLPEHYASQIDFEKRLGQFFDEKEPKLAWKQNDEGRFEFIFQQSFNEMIEEFKNKGVVREDKKIPYDWTIYYLRKKALSQEIEKEELAWILLNFNQKRGYYQLRGEEEEENPNKLVEYYSLKIVDVIADEKPNSKGDIWYSLHLENGWIYRRSSKIPLFGWKDKTRDFIVTTDLNDDGTVKKDKEGIEKRSFRAPSENDWVLLKKKTESDIEKSHKTVGAYVYETLLQNPMQKVRGKLVRTIERKFYKDELKQILEKQREFHPELRDEDLYNDCVRELYRSNETYQFILSKRDFVHLFLDDILFYQRPLRSQKSAIGDCILEFKTYKDKDGNNIKEYLKVISKSNPLYQEFRIWQWLYNLKIYRKEDDEDVTLQFIANIEDKEQLFDFLSNRKSIEQKPLLEYLIKAKGLKKQVKTEAYRWNYVEDKIYPCSETKTMISTRLAKVENIPDNFFTKEIEQKLWHIIYSVTDKNEFEKALRTFAKKYDLDIASFVDNFKKIPPFKNEYGSFSEKAIKKLLPLMRLGKYWKWNDIDNNTQNRISKIITGEYDEEIKDIVREKSIALTNENDFQGLQLWLAQYLVYGRHSEADIAGKWHSVADLEKYLNEFKQHSLRNPIVEQIITETLRVVRDIWRKYGQGAENFFSEIHVELGRDMKNTADERKKIVNVVTENENTNLRIKALLMELKNNSDGKLEVENVRPYSPTQQDILKIYEEYAISTGLDNEKDEKVKEDIKKISRVAQPTTTELQRYKLWLEQKYCSPYTGKVIPLGKLFTEEYQIEHIIPKSRYYDDSFSNKVICEAAVNKLKDKCLGLEFIKNYHGQIVETGFGQKVTIFDEEAYQNFVKQHYAYNRSKRTKLLLEEIPEKMIERQMNDTRYISKFVLPLLSNLVRAEENDNGVNSKNVLPVNGKITTMLKQDWGLNDVWNDLILPRFVRMNELAKTIAFTSWNEQHQKYLPTVPLELSKGFQKKRIDHRHHAMDALVIACATRDHVNLLNNKHANTDTIRYDLQRKLRLFERVTYIDPQTKNNVTKDIPKEFKKPWDNFTVDARNELEKIIVSFKQNLRIINKATNIYTKYENGKKIKVGQKGLNWAIRKPLHKETVFAKVSLRKRKTVRLSEALKDWKKIVDKKLKQEIKRLTCQYGKFDVDTILRYFKDRKYQFGEVDVSKVKMYYFDEENAAVRKNVDTSFTEKFIQGSVTDTGIQKILLNHLEAKGNKVEIAFSPEGIEEMNKNIIQLNEGKLHLPIFKVRVYETIGNKFSVGVKGNKKDKYVEAAKGTNLFFAIYVDENGIRSYETIPLNIVIERLKQGLSVVPEKNRKEHSLLFYLSPNDLVYVPIEDERENIHAVNLDQLNNEQRKRIYKMVSCTGSECHFVPYYVASPIVNKVEYSSLNKIGRSLTGEMIKDVCIKLKVDRLGNVKGISGL

SEQ ID NO: 300 - protein, 1436 aa, Bacteroides sp.
MKRILGLDLGTNSIGWALVNEAENKDERSSIVKLGVRVNPLTVDELTNFEKGKSITTNADRTLKRGMRRNLQRYKLRRETLTEVLKEHKLITEDTILSENGNRTTFETYRLRAKAVTEEISLEEFARVLLMINKKRGYKSSRKAKGVEEGTLIDGMDIARELYNNNLTPGELCLQLLDAGKKFLPDFYRSDLQNELDRIWEKQKEYYPEILTDVLKEELRGKKRDAVWAICAKYFVWKETYTEWNKEKGKTEQQEREHKLEGIYSKRKRDEAKRENLQWRVNGLKEKLSLEQLVIVFQEMNTQINNSSGYLGAISDRSKELYFNKQTVGQYQMEMLDKNPNASLRNMVFYRQDYLDEFNMLWEKQAVYHKELTEELKKEIRDIIIFYQRRLKSQKGLIGFCEFESRQIEVDIDGKKKIKTVGNRVISRSSPLFQEFKIWQILNNIEVTVVGKKRKRRKLKENYSAIFEELNDAEQLELNGSRRLCQEEKELLAQELFVRDKMTKSEVLKLLFDNPQELDLNFKTIDGNKTGYALFQAYSKMIEMSGHEPVDFKKPVEKVVEYIKAVFDLLNWNTDILGFNSNEELDNQSYYKLWHLLYSFEGDNTPTGNGRLIQKMTELYGFEKEYATILANVSFQDDYGSLSAKAIHKILPHLKEGNRYDVACVYAGYRHSESSLTREEIANKVLKDRLMLLPKNSLHNPVVEKILNQMVNVINVIIDIYGKPDEIRVELARELKKNAKEREELTKSIAQTTKANEEYKTLLQTEFGLTNVSRTDILRYKLYKELESCGYKTLYSNTYISREKLFSKEFDIEHIIPQARLFDDSFSNKTLEARSVNIEKGNKTAYDFVKEKFGESGADNSLEHYLNNIEDLFKSGKISKTKYNKLKMAEQDIPDGFIERDLRNTQYIAKKALSMLNEISHRVVATSGSVTDKLREDWQLIDVMKELNWEKYKALGLVEYFEDRDGRQIGRIKDWTKRNDHRHHAMDALTVAFTKDVFIQYFNNKNASLDPNANEHAIKNKYFQNGRAIAPMPLREFRAEAKKHLENTLISIKAKNKVITGNINKTRKKGGVNKNMQQTPRGQLHLETIYGSGKQYLTKEEKVNASFDMRKIETVSKSAYRDALLKRLYENDNDPKKAFAGKNSLDKQPIWLDKEQMRKVPEKVKIVTLEAIYTIRKEISPDLKVDKVIDVGVRKILIDRLNEYGNDAKKAFSNLDKNPIWLNKEKGISIKRVTISGISNAQSLHVKKDKDGKPILDENGRNIPVDFVNTGNNHHVAVYYRPVIDKRGQLVVDEAGNPKYELEEVVVSFFEAVTRANLGLPIIDKDYKTTEGWQFLFSMKQNEYFVFPNEKIGFNPKEIDLLDVENYGLISPNLFRVQKFSLKNYVFRHHLETTIKDTSSILRGITWIDFRSSKGLDTIVKVRVNHIGQIVSVGEY

SEQ ID NO: 301 - protein, 1424 aa, Bacteroides sp.
MKRILGLDLGTNSIGWALVNEAETDEEVSSIIRLGVRVNPLTVDETQNFEKGKSITTNAERTLKRSMRRNLQRYKLRRDALVEFLKELGFITDETILSEQGNRTTFETCRLRAKAAEEEISLEELSRVLLMINKKRGYKSSRKVKKEEDGVLIDGMEIAKKLYEEDLTPGQLCSQLLESGKKVLPDFYHSDLQEELDRIWSVQKQFHPDVFCDAAKEEIKGKNRSQTWAILANYFVWKEEVVGWNDREAKNETIEKECKLVGLKRTTKGYELKKENYRWRAQALTEQLGLEEIAVVLQEINGQINASSGYLGAISDRSKVLYFNHQTVGQYQMAELDKNPHASLRNMVFYRQDYLDEFDRIWEKQAEFHKELTAELKKEIRDMIIFYQRRLKSQKGLISFCEFERLEIVVEKDGKKQTKVIGCKVIPRSHPLFQEFKVWQTLNDIKVLGREKKRNALSASESRALYPEEKEILARELAIKENMKKADVLKLLFENPQELDLNFKQIDGNRTGFSLFSAYSKMIEKYGYEPLDFKKPADEIIGQLRTIFTDLGWNTNLFTIDLTKEGKELEMQPYFRLWHLLYSFEGDNTSTGNGKLIEKIMQLCGVEKEYAVELASLSFQDDYGSLSAKAIKRILPYLKEGNLYDVACEYAGYRHSKSSLTKEEIENKVLKGKLEVLPKNSLRNPVVEKILSQMVNVINTIIDTYGKPDEIRVELARELKKSAKEREELTKAIAKSTREHEEIRKLLQDEFGMMNVSRNDIIRYKLYEELKDNGYKTLYSNQYIPKEKIFSKEIDIEHIIPQSRLFDDSLSNKTLEYKAINIEKGNKTAYDFVKEKYGEEGLQQYINRCESLFNDKKAKLRKLKMEQKDIPDGFIDRDLRNTQYIAKKALAMLNEICRRVVATTGSITDQLREDWQLVDVMKELNLPKYEALGFVETYEDKDGRKIKRIKDWTKRNDHRHHAMDALTVAFTKDAFIQYFNNKNAAQDSGNRNHTNIIGIKTRYFDKGRALPPIPLEQFRIEAKQHLEKLLVSIKAKNKVVTVNVNRTKKRKGENTKIQQTPRGQLHLETVYGSHKQYVTKIEKVNASFDAAKIATVSKRAYRNALLKRLETFGNDPKKAFTGKNALEKNPLYADKYQTIRVPEKVQTVEFETIYTIRKPVDPALNVDKVVDVKVRAILERRLKEYGGDPKKAFVNFWENPIWLNKEKGISIKRVSIRGINNAQSIHVKKDKNGNPIWDENGKQIPVDFVNTGNNHHVAIYRKPVLDKKGQVTFDEDGNLMYELDEVVVPFFEAVTRANLGLPIIDKDYRKSEGWQFLFSMKQNEYFVFPNEKTGFNPKEVDLLNPDNYAMISPNLFRVQTMSKVMYGNNVVRDYKFRHHLETTVKDMKELKDIAYKQYKTLSFGNSVVKIRINHIGQIVSVGEY

SEQ ID NO: 302 - protein, 1055 aa, Bacteroides sp.
MRIYRKDLAQDVDVTNELLKTEEDYVALFDWLNGKKEIDQKAFLKYPLFGLKKEVENYRWNYVQDKPYPCNETRSSMLARLEKCDISIEFLTKENEEALWHILYSVEDKNEIVKALQKFADKHDLNASFVDVFQKFPPFKKEYGSYSAKAIKKLLPLMRMGKYWSENSIDKGTRERMDKIITGEYDEKIENRVREKAIHLADVSDFKGLPLWLVCYIVYGRHSEAKEITQWKSPADIDLYLRSFKQHSLRNPIVEQIIIETLRVVRDIWKQVGNIDEIHVELGREMKNPADKRKKMTQQMSENENTNLRIKYLLTEFLNPEYEVENVRPYSPSQQDILRIYEEGVLNSVSDLPEEISDILKKFTETDLKKRPSRSEVLRYKLWLEQKYRSPYTGEVIPLGKLFTPAYEIEHVIPQSCYFDDSFSNKVICEAEVNKLKSNLLGHEFIVKHHGEIVELPFGKKVRIFTVDEYEQFVKDNYSRTRSKMKKLLMDDIPEEFVARQLNDSRYISKVVKSLLSNIVREKGEEEAISKNVIPCTGGVTDRLKKDWGINEVWNKIILPRFQRLNELTGTNKFTTKNVGIQEIPTMPLELQKGFNKKRIDHRHHAMDAIIIACANRNIINYLNNESATAKAELSRYDLQKMLCDKAKTDNNGNYKWVIRKPWASFTQDTYLALENIIVSFKQNLRVINKATNHFLHYNEEGKKIFVKQGKGDNWAIRKSMHKDTVFGEVNLRRIKTVALNEAMKNPQSIVVKDFKRKLLELWNLGFDAKRIKKYFEDNRETWSDINLSKIEVYYFSKDTKDRFFATRKPLDTSFDRKKIENNITDTGIQKILLRHLELKDNNPDIAFSPDGIDEMNRNIIQLNNGKYHQPIIKVRWYEQADKFAVGQTGNKSSKFVEAAKGTNLFFAVYESNILDKKTNTIIKKRNYATIPLNVAIERQKQGLPVAPEDENGNDPIFVLSPNDLVYLPTAADLANGIIAQPLDRGRIYKMVSCTGNEGYFIPARIANPILQTIELGSNNKAQKAWTDEMIKEICMPIKVDRLGNVLESSSSYKK

SEQ ID NO: 303 - protein, 1055 aa, Bacteroides sp.
MRIYRKDLAQDVDVTNELLKTEEDYVALFDWLNGKKEIDQKAFLKYPVFGLKKEIENYRWNYVQDKPYPCNETRSLMLARLEKCDISIEFLTKENEEALWHILYSVEDKNEIVKALQKFADKHDLNASFVDVFQKFPPFKKEYGSYSAKAIKKLLPLMRMGKYWSENSIDKGTRERIDKIITGEYDEKIENRVREKAIHLADVSDFKGLPLWLVCYIVYGRHSEAKEIIQWKSPADIDSYLRSFKQHSLRNPIVEQIIIETLRVVRDIWKQVGNIDEIHVELGREMKNPADKRKKMTQQMSENENTNLRIKYLLTEFLNPEYEVENVRPYSPSQQDILRIYEEGVLNSVSDLPEEISDILKKFTETDLKKRPSRSEVLRYKLWLEQKYRSPYTGEVIPLGKLFTPAYEIEHVIPQSCYFDDSFSNKVICEAEVNKLKSNLLGHEFIVKHHGEIVELPFGKKVRIFTVDEYEQFVKDNYSRTRSKMKKLLMDDIPEEFVTRQLNDSRYISKVVKSLLSNIVREKGEEEAISKNVIPCTGGVTDRLKKDWGINEVWNKIILPRFQRLNELTGTNKFTTKNVGIQEIPTMPLELQKGFNKKRIDHRHHAMDAIIIACANRNIINYLNNESATAKAELSRYDLQKMLCDKAKTDNNGNYKWVIRKPWASFTQDTYLALENIIVSFKQNLRVINKATNRFLHYNEEGKKIFVKQGKGDNWAIRKSMHKDTVFGEVNLRRIKTVALNEAMKNPQSIVVKDFKRKLLELWNLGFDAKRIKKYFEDNRETWSDINLSKIEVYYFSKDTKDRFFATRKPLDTSFDRKKIENNITDTGIQKILLRHLELKDNNPDIAFSPDGIDEMNRNIIQLNNGKYHQPIIKIRWYEQADKFAVGQTGNKSSKFVEAAKGTNLFFAVYESNILDKKTNTIIKKRNYATIPLNVAIERQKQGLPVAPEDENGNDPIFVLSPNDLVYLPTDDELANGIIAQPLDRGRIYKMVSSSGEQCFFIKHIVANVLVDKFEFSPLNKMERALTGEMIKMICIPIKVDRLGNVLESSSSYKK

SEQ ID NO: 304 - protein, 286 aa, Bacteroides uniformis
MLSYKYDKKKIEKYFKENAFLWKELDIAKVAVYYFTENTTEPLVAVRKSLDSTFNEKKIASVTDTGIQKILLNHLKSKEGKAELAFSAEGIEEMNRNLLQLNDGKGHQPIYKVRVYEPRGNKFKVGVLGNKGAKWVEAAKGTNLFFAIYITEDGNRTYETIPLNWVIEREKQGLVPVPDRNEKGDKLLFWLSPNDLVYLPTEEERDFGRINEPIDRGRIYKMVSSSGNQCFFIPQSISNAIISTKELGSNNKAEKSWDGEMIKNICIPVKVDRLGRIIEVKYRVNE

SEQ ID NO: 305 - protein, 1508 aa, Bacteroides uniformis
MRTILGLDLGTNSIGWAVINSVIKEQTERIWIEMAGSRIIPMDAAILGDFDKGNSISQTAERTRFRGVRRLRERQLLRRERLHKVLKILGFLPEHYLKGIDFEKHTGKFLSGSEPKLPWVKDRWGKYSFLFQTAFNEMLADFAKHQPSLVFDGKKIPYDWTVYYLRKKALTEMISKEELAWILLNFNQKRGYYQLRGEEEEDNAGKSVEFYALKVLSVEATDEKKGRDIWYNVHLENGWVYRRSSNVPLDWEGRVKEFIVTTDLNPDGTPKLDKYGEVKRSFRAPKEDDWMLIKKRTEADITGTHKTIGSYIYDALLQEPQQKIIGKLVKTVERKFYKEELNFILQKQCAFHAELQDRDLYMRCIEALYPGNEVQRRNIANRDFIYLLIDDVLFYQRPLKTKKSLIANCPYEENEYVNRKTGEIKTAPLKCIAKSHPLFQEFRLWYFLSNIRVYQKEREVNGTLHLDVDVTTEFLKTEDDYVALFDWLNSRKEIDQKAFLRYPAFGLKKEINNYRWNYVEDKFYPCNETRHAILSRLEKAGIGIDFLSDEKETALWHILYSVSDKQEIEKALATFAVKNGLNESFVEVFKKFPPFKSEYGAYSAKAIKKLLPLMRCGKYWDMSLIDGTTKERIERIIAGECDESIGAKVREKAMNLSDISCFKRLPLWLACYVVYNRHSEDKEITKWETPADIDAYLAAFKQHSLRNPIVEQVITETLRVVRDIWKQVGKIDEIRIELGREMKNPADKRKRMTTQILENENANLRIKALLAEFVNPEYGVENVRPYSPSQQEILRIYEDAVLKGEEQIPEDIDVILKKFNTSKLPTKSEFLRYKLWLEQKYRSPYTGELIPLAKLFTAAYEIEHVIPQSRYFDDSFSNKVICESAVNKLKDNQLGYEFIKNHHGQKVEVGFGKTVEIFSVDSYERFVKEQYAKSGIKMKKLLMDDIPEQFIERQLNDSRYISKVVKGLLSNIVREKNDSGEYEPEAVSKNILVCTGSVTDRLKKDWGMNDVWNSIVSPRFERLNALTETQCFGHWENKDGKKVFQTAVPLEYQKGFSKKRIDHRHHAMDAIVIACATRNHVNYLNNESASRNAKISRYDLQRLLCDKSRGDGNGNYRWIIKKPWTTFTQDAREALSGIIVSLKQNLRIINKTTNIYQHFDANGTRVYEKQKIGDSWAIRKPMHKDTVFGAVNLRKVKVVRLSVALDTPSMIVNKRVKNKVLELLSYKYDKKKIEKYFKENAFLWKELDIAKVAVYYFTENTTEPLVAVRKSLDSTFNEKKIASVTDTGIQKILLNHLKSKEGKAELAFSAEGIEEMNRNLLQLNDGKGHQPIYKVRVYEPRGNKFKVGVLGNKGAKWVEAAKGTNLFFAIYITEDGNRTYETIPLNWVIEREKQGLVPVPDRNEKGDKLLFWLSPNDLVYLPTEEERDFGRINEPIDRGRIYKMVSSSGNQCFFIPQSISNAIISTKELGSNNKAEKSWDGEMIKNICIPVKVDRLGRIIEVKYRVNE

SEQ ID NO: 306 - protein, 1210 aa, Bacteroides uniformis
MRTILGLDLGTNSIGWAVINSVIKEQTERIWIEMAGSRIIPMDAAILGDFDKGNSISQTAERTRFRGVRRLRERQLLRRERLHKVLKILGFLPEHYLKGIDFEKHTGKFLSGSEPKLPWVKDRWGKYSFLFQTAFNEMLADFAKHQPSLVFDGKKIPYDWTVYYLRKKALTEMISKEELAWILLNFNQKRGYYQLRGEEEEDNAGKSVEFYALKVLSVEATDEKKGRDIWYNVHLENGWVYRRSSNVPLDWEGRVKEFIVTTDLNPDGTPKLDKYGEVKRSFRAPKEDDWMLIKKRTEADITGTHKTIGSYIYDALLQEPQQKIIGKLVKTVERKFYKEELNFILQKQCAFHAELQDRDLYMRCIEALYPGNEVQRRNIANRDFIYLLIDDVLFYQRPLKTKKSLIANCPYEENEYVNRKTGEIKTAPLKCIAKSHPLFQEFRLWYFLSNIRVYQKEREVNGTLHLDVDVTTEFLKTEDDYVALFDWLNSRKEIDQKAFLRYPAFGLKKEINNYRWNYVEDKFYPCNETRHAILSRLEKAGIGIDFLSDEKETALWHILYSVSDKQEIEKALATFAVKNGLNESFVEVFKKFPPFKSEYGAYSAKAIKKLLPLMRCGKYWDMSLIDGTTKERIERIIAGECDESIGAKVREKAMNLSDISCFKRLPLWLACYVVYNRHSEDKEITKWETPADIDAYLAAFKQHSLRNPIVEQVITETLRVVRDIWKQVGKIDEIRIELGREMKNPADKRKRMTTQILENENANLRIKALLAEFVNPEYGVENVRPYSPSQQEILRIYEDAVLKGEEQIPEDIDVILKKFNTSKLPTKSEFLRYKLWLEQKYRSPYTGELIPLAKLFTAAYEIEHVIPQSRYFDDSFSNKVICESAVNKLKDNQLGYEFIKNHHGQKVEVGFGKTVEIFSVDSYERFVKEQYAKSGIKMKKLLMDDIPEQFIERQLNDSRYISKVVKGLLSNIVREKNDSGEYEPEAVSKNILVCTGSVTDRLKKDWGMNDVWNSIVSPRFERLNALTETQCFGHWENKDGKKVFQTAVPLEYQKGFSKKRIDHRHHAMDAIVIACATRNHVNYLNNESASRNAKISRYDLQRLLCDKSRGDGNGNYRWIIKKPWTTFTQDAREALSGIIVSLKQNLRIINKTTNIYQHFDANGTRVYEKQKIGDSWAIRKPMHKDTVFGAVNLRKALIPQHYNLTLFISS

SEQ ID NO: 307 - protein, 1504 aa, Bacteroides vulgatus
MKNIVGLDLGTNSIGWAVVNGSVNDDGSEQLVKIQASGSRIIPMDAAMIGDFNKGNSISQTAERTRLRGVRRLSERYLLRRERLHRILDILGFLPFHFAQDLDRHGKIVKGKEPKLAWRKNEAGQFEFIFQDSFKEMLEDFKLNHPNLITDDKKVPYDWTIYYLRKKGLTSKISKEELAWILLNFNQKRGYYQLRGEEEEENKNKLVEFYALKVVAVEDSGEKKGKDIWYNVHLENGWVYRRTSNMPLDWVGKTKEFIVTTDLEKDGTPKKDKEGNVKRSFRAPKEDDWSLLKKKTEADIDQTHKTVGVYIYDTLLGNPSQKIRGRLVRTIERKYYKEELKQILEKQKEFHLELQDRALYAACIEELYPINEAHRNNVGNRDFTYLFLEDILFYQRPLKSKKSLIDNCPYEENQGLDKETGEIKSFPVKCIAKSHPLFQEFRLWQFIVNLRIYRKDLAQDVDVTNELLKTEEDYVALFDWLNGKKEIDQKAFLKYPVFGLKKEIENYRWNYVQDKPYPCNETRSLMLARLEKCDISIEFLTKENEEALWHILYSVEDKNEIVKALQKFADKHDLNASFVDVFQKFPPFKKEYGSYSAKAIKKLLPLMRMGKYWSENSIDKGTRERIDKIITGEYDEKIENRVREKAIHLADVSDFKGLPLWLVCYIVYGRHSEAKEITQWKSPADIDSYLRSFKQHSLRNPIVEQIIIETLRVVRDIWKQVGNIDEIHVELGREMKNPADKRKKMTQQMSENENTNLRIKYLLTEFLNPEYEVENVRPYSPSQQDILRIYEEGVLNSVSDLPEEISDILKKFTETDLKKRPSRSEILRYKLWLEQKYRSPYTGEVIPLGKLFTPAYEIEHVIPQSCYFDDSFSNKVICEAEVNKLKSNLLGHEFIVKHHGEIVELPFGKKVRIFTVDEYEQFVKDNYSRTRSKMKKLLMDDIPEEFVTRQLNDSRYISKVVKSLLSNIVREKGEEEAISKNVIPCTGGVTDRLKKDWGINEVWNKIILPRFQRLNELTGTNKFTTKNVGIQEIPTMPLELQKGFNKKRIDHRHHAMDAIIIACANRNIINYLNNESATAKAELSRYDLQKMLCDKAKTDNNGNYKWVIRKPWASFTQDTYLALENIIVSFKQNLRVINKATNRFLHYNEEGKKIFVKQGKGDNWAIRKSMHKDTVFGEVNLRRIKTVALNEAMKNPQSIVVKDFKRKLLELWNLGFDAKRIKKYFEDNRETWSDINLSKIEVYYFSKDTKDRFFATRKPLDTSFDRKKIENNITDTGIQKILLRHLELKDNNPDIAFSPDGIDEMNRNIIQLNNGKYHQPIIKIRWYEQADKFAVGQTGNKFSKFVEAAKGTNLFFAVYESNILDKKTNTIIKKRNYATIPLNVAIERQKQGLPVAPEDENGNDPIFVLSPNDLVYLPTDDELANGIIAQPLDRGRIYKMVSCTGNEGHFIPARIANPILQTIELGSNNKAQKAWTDEMIKEICMPIKVDRLGNVLESSSSYKK

SEQ ID NO: 308 - protein, 1153 aa, Barnesiella intestinihominis
MKNILGLDLGLSSIGWSVIRENSEEQELVAMGSRVVSLTAAELSSFTQGNGVSINSQRTQKRTQRKGYDRYQLRRTLLRNKLDTLGMLPDDSLSYLPKLQLWGLRAKAVTQRIELNELGRVLLHLNQKRGYKSIKSDFSGDKKITDYVKTVKTRYDELKEMRLTIGELFFRRLTENAFFRCKEQVYPRQAYVEEFDCIMNCQRKFYPDILTDETIRCIRDEIIYYQRPLKSCKYLVSRCEFEKRFYLNAAGKKTEAGPKVSPRTSPLFQVCRLWESINNIVVKDRRNEIVFISAEQRAALFDFLNTHEKLKGSDLLKLLGLSKTYGYRLGEQFKTGIQGNKTRVEIERALGNYPDKKRLLQFNLQEESSSMVNTETGEIIPMISLSFEQEPLYRLWHVLYSIDDREQLQSVLRQKFGIDDDEVLERLSAIDLVKAGFGNKSSKAIRRILPFLQLGMNYAEACEAAGYNHSNNYTKAENEARALLDRLPAIKKNELRQPVVEKILNQMVNVVNALMEKYGRFDEIRVELARELKQSKEERSNTYKSINKNQRENEQIAKRIVEYGVPTRSRIQKYKMWEESKHCCIYCGQPVDVGDFLRGFDVEVEHIIPKSLYFDDSFANKVCSCRSCNKEKNNRTAYDYMKSKGEKALSDYVERVNTMYTNNQISKTKWQNLLTPVDKISIDFIDRQLRESQYIARKAKEILTSICYNVTATSGSVTSFLRHVWGWDTVLHDLNFDRYKKVGLTEVIEVNHRGSVIRREQIKDWSKRFDHRHHAIDALTIACTKQAYIQRLNNLRAEEGPDFNKMSLERYIQSQPHFSVAQVREAVDRILVSFRAGKRAVTPGKRYIRKNRKRISVQSVLIPRGALSEESVYGVIHVWEKDEQGHVIQKQRAVMKYPITSINREMLDKEKVVDKRIHRILSGRLAQYNDNPKEAFAKPVYIDKECRIPIRTVRCFAKPAINTLVPLKKDDKGNPVAWVNPGNNHHVAIYRDEDGKYKERTVTFWEAVDRCRVGIPAIVTQPDTIWDNILQRNDISENVLESLPDVKWQFVLSLQQNEMFILGMNEEDYRYAMDQQDYALLNKYLYRVQKLSKSDYSFRYHTETSVEDKYDGKPNLKLSMQMGKLKRVSIKSLLGLNPHKVHISVLGEIKEIS

SEQ ID NO: 309 - protein, 1352 aa, Belliella baltica
MKKILGLDLGTTSIGWAFIKEPEKDVVGSEIVDMGVRIVPLSSDEENDFAKGNTISINADRTLKRGARRNLQRFKQRRNALLEIFKEKKLISTNFKYAEDGPSSTFSTLNLRAKAAKEKIELQDLVKVLLQINKKRGYKSSRKAKSEEDDGSAIDSMGIAKELYENDLTPGQWVYEALQKGRKNVPDFYRSDLQEEFKKIVNYQSEFFPDIFNASFVEDWMGKASTPTKQYFNKKGVQLAENKGKREERRLQEYKWRAEAVNFKIDLSEIALILSQINSQISNSSGYLGAISDRSKELYFKNLTVGQYLYQQIKKNPHTRLKGQVFYRQDYLDEFERIWSVQSSFYPQLNDALKREVRDITIFFQRRLKSQKHLISNCEFEDHHKVVPKSHPVFQEFRIWQNLNNLLLIKKDNLNEKFDLELESKIALANELAFKRELNVKDALKILGLKPNEWEFNFTKIEGNRTNQAFFDAFAKIIELEDGEPIDLGDLKADDILDQFSEAFLRIGIDTELLQVNSDIEGAEYEKQSYIQFWHLLYSSEDDQKLKLNLIRKFGFKPEHAKILASISLQDDHASLSSRAIKKILPHLQSGLIYDKACTYAGYNHSSSFTKDENEKRELRAELELLKKNSLRNPVVEKILNQMINVVNAILKDPELGRPDEIRVEMARELKANAEQRKNMTSNIASATRDHDKYREILKSEFGLKRVTKNDLLRYKLWLETDGISLYTGKPIEASKLFSKEYDIEHIIPKARLFDDSFSNKTICERQLNIDKANVTAFSFLQNKLSADEFEQYQSRVKSLYGKLSKAKIQKLLMANDKIPEDFIARQLQETRYISKKAKEILFEISRRVSVTTGTITDKLREDWGLVEIMKELNWEKYDKLGLTYTIEGKHGERLNKIKDWSKRNDHRHHAMDALTVALTKPAYIQYLNNLNAKGLNNKKGTEVFAIEQKYLKRENGKLCFIPPIENIRSEAKKHLSRILVSYKAKNKVVTINKNKTKSKAGLNEQIALTPRGQLHKETVYGKSFHYSTKFEKIGASFNVQKINTVAKKEEREALLKRLAENGNDPKKAFTGKNTLNKMPIYLDLGKNIKLSEKVKTVVLEQNYTIRKNIDPDLKVDKVIDVGIKRILESRLEEFGGNAKLAFSNLEENPIWLNKEKGISIKRVKISGVSNVESLHVKKDHFGEPILDQEGNEIPVDFVSTGNNHHVAIYEDENGNLQEEVVSFFEAVVRQNQGLPIIKKNHTLGWKFLFTLKQNEYFVFPSDDFVPADVDLMDEQNYHLISPNLFRVQKIARKNYVFNNHLETKAVDNDLLKSKKELSKITYHFYQTPEHLRGIIKIRINHLGKIIQIGEY

SEQ ID NO: 310 - protein, 1415 aa, Bergeyella zoohelcum
MKHILGLDLGTNSIGWALIERNIEEKYGKIIGMGSRIVPMGAELSKFEQGQAQTKNADRRTNRGARRLNKRYKQRRNKLIYILQKLDMLPSQIKLKEDFSDPNKIDKITILPISKKQEQLTAFDLVSLRVKALTEKVGLEDLGKIIYKYNQLRGYAGGSLEPEKEDIFDEEQSKDKKNKSFIAFSKIVFLGEPQEEIFKNKKLNRRAIIVETEEGNFEGSTFLENIKVGDSLELLINISASKSGDTITIKLPNKTNWRKKMENIENQLKEKSKEMGREFYISEFLLELLKENRWAKIRNNTILRARYESEFEAIWNEQVKHYPFLENLDKKTLIEIVSFIFPGEKESQKKYRELGLEKGLKYIIKNQVVFYQRELKDQSHLISDCRYEPNEKAIAKSHPVFQEYKVWEQINKLIVNTKIEAGTNRKGEKKYKYIDRPIPTALKEWIFEELQNKKEITFSAIFKKLKAEFDLREGIDFLNGMSPKDKLKGNETKLQLQKSLGELWDVLGLDSINRQIELWNILYNEKGNEYDLTSDRTSKVLEFINKYGNNIVDDNAEETAIRISKIKFARAYSSLSLKAVERILPLVRAGKYFNNDFSQQLQSKILKLLNENVEDPFAKAAQTYLDNNQSVLSEGGVGNSIATILVYDKHTAKEYSHDELYKSYKEINLLKQGDLRNPLVEQIINEALVLIRDIWKNYGIKPNEIRVELARDLKNSAKERATIHKRNKDNQTINNKIKETLVKNKKELSLANIEKVKLWEAQRHLSPYTGQPIPLSDLFDKEKYDVDHIIPISRYFDDSFTNKVISEKSVNQEKANRTAMEYFEVGSLKYSIFTKEQFIAHVNEYFSGVKRKNLLATSIPEDPVQRQIKDTQYIAIRVKEELNKIVGNENVKTTTGSITDYLRNHWGLTDKFKLLLKERYEALLESEKFLEAEYDNYKKDFDSRKKEYEEKEVLFEEQELTREEFIKEYKENYIRYKKNKLIIKGWSKRIDHRHHAIDALIVACTEPAHIKRLNDLNKVLQDWLVEHKSEFMPNFEGSNSELLEEILSLPENERTEIFTQIEKFRAIEMPWKGFPEQVEQKLKEIIISHKPKDKLLLQYNKAGDRQIKLRGQLHEGTLYGISQGKEAYRIPLTKFGGSKFATEKNIQKIVSPFLSGFIANHLKEYNNKKEEAFSAEGIMDLNNKLAQYRNEKGELKPHTPISTVKIYYKDPSKNKKKKDEEDLSLQKLDREKAFNEKLYVKTGDNYLFAVLEGEIKTKKTSQIKRLYDIISFFDATNFLKEEFRNAPDKKTFDKDLLFRQYFEERNKAKLLFTLKQGDFVYLPNENEEVILDKESPLYNQYWGDLKERGKNIYVVQKFSKKQIYFIKHTIADIIKKDVEFGSQNCYETVEGRSIKENCFKLEIDRLGNIVKVIKR

SEQ ID NO: 311 - protein, 1430 aa, Bergeyella zoohelcum
MKHILGLDLGTNSIGWAVVKEAQNDNEQSEIVDVGVRVNPLTTDEKTNFEKGKPISTNADRTLKRSARRNLQRYKLRRKELIELLKEHQLISTDTILTENGKGTTFQTLELRAKSAKEKISLEELARVFLTINKKRGYKSSRKAKNEDEGQLIDGMEIAKRLYEENLTTGQLSLQLLKEGKKSLPDYYRSDLQFELDKVWNFQKQFHSDILTDEFYAQLKGKGQRATSALFLAKYQIYTAENKGSREDKKLQAYQWRVDALSKELTREQLAFVITEINNNLNNSSGYLGAISDRSKELYFNNETVGEYLWKQIAANPHTSLKNQVFYRQDYLDEFEQIWKTQSAFYPEILTDELKKELRDVVIFYQRKLKSQKSLVSFCEFENKEIEIKKEDGTSTKKVIGLKVAPKSSPLFQEFKIWQNLNNVLIRKKGSKTKKVAKNQQAVLFEEEKTISELDLEAKQALFNELNLKGNLKADYCLEILGYSPKEWEMNYSVLEGNRTNKALYEAYLKITDLEGYDAKNHLKVKLNKDEVELDDLKVPASEIKDMVQAIFKEAGINTDILHFNAELDGKDFENQASYQLWHLLYSYEGDDSKSGNELLYKLLETKFGFKKEYAQILANVSLSDDYGSLSTKAMRKIHPYIKENKFSTACELAGYRHSKHSLTKEENDNRVLKDSLEVLKKNSLRQPVVEKILNQMINLVNALLKKYRTENPNFKFDEIRIELARELKKNAEERANMTANINKAKTEHEKIIKILKNEFGLPNPTRNDIIRYRLYEELKANGYKDLYTNIKIPQEKLFTKEIDIEHIIPKSRVFDDSFSNKTLSFRKTNLDKGERTAFDYMESKFGADKLEEYVARVEDLYKNNIISKAKYQKLLKKESEIGDGFVERDLRETQYIAKKAKEILLQITPNVLSTSGGITDRLREDWDLINVMKELNLPKYRALGLTQMEDRKYGQQVEVITDWTKRNDHRHHAMDALTVAFTKHNHIQYLNYLNARKNEKHKEHSNIMGIQQLETIKVTDKNGNEKRVFKAPMPNFRQVTKAFLENILISHKAKNKVVTKNKNKVAGSNKVQEVLTPRGQLHKETVYGKYQYYVQKEEKIGAKFDLETIKKVANPLYQSLLKKRLEENGGDPKKAFTGKNSLAKNPIYLDDTQTEQLPEKVKLVWLENSFSIRKDITPENFKDEKLIDKILDEGVKRILKERLQSFGNDAKKAFSDLDKNPIWLNKEKGITIKRVTISGVANAEPLHTKKDHLGKEILDKEGKPIPVDFISTGSNHHVAVYRDEKGNLQEKVVSVFEAVVRANQGLPIIDKTYNQHLGWEFLFTMKQNEMFVFPNESTGFNPNDIDLLDPKNKRIISPNLFRVQKFSKLQYGNSFVREFVFRHHLETTVEDRKELQGITYKQMKNSTFFNDIIKVRINHLGDIVSIGEY

SEQ ID NO: 312 - protein, 1281 aa, Bifidobacterium bifidum
MEDDSQHDIREIYLAIHHMVKYRGNFLVEGTLESSNAFKEDELLKLLGRITRYEMSEGEQNSDIEQDDENKLVAPANGQLADALCATRGSRSMRVDNALEALSAVNDLSREQRAIVKAIFAGLEGNKLDLAKIFVSKEFSSENKKILGIYFNKSDYEEKCVQIVDSGLLDDEEREFLDRMQGQYNAIALKQLLGRSTSVSDSKCASYDAHRANWNLIKLQLRTKENEKDINENYGILVGWKIDSGQRKSVRGESAYENMRKKANVFFKKMIETSDLSETDKNRLIHDIEEDKLFPIQRDSDNGVIPHQLHQNELKQIIKKQGKYYPFLLDAFEKDGKQINKIEGLLAFRVPYFVGPLVVPEDLQKSDNSENHWMVRKKKGEITPWNFDEMVDKDASGRKFIERLVGTDSYLLGEPTLPKNSLLYQEYEVLNELNNVRLSVRTGNHWNDKRRMRLGREEKTLLCQRLFMKGQTVTKRTAENLLRKEYGRTYELSGLSDESKFTSSLSTYGKMCRIFGEKYVNEHRDLMEKIVELQTVFEDKETLLHQLRQLEGISEADCALLVNTHYTGWGRLSRKLLTTKAGECKISDDFAPRKHSIIEIMRAEDRNLMEIITDKQLGFSDWIEQENLGAENGSSLMEVVDDLRVSPKVKRGIIQSIRLIDDISKAVGKRPSRIFLELADDIQPSGRTISRKSRLQDLYRNANLGKEFKGIADELNACSDKDLQDDRLFLYYTQLGKDMYTGEELDLDRLSSAYDIDHIIPQAVTQNDSIDNRVLVARAENARKTDSFTYMPQIADRMRNFWQILLDNGLISRVKFERLTRQNEFSEREKERFVQRSLVETRQIMKNVATLMRQRYGNSAAVIGLNAELTKEMHRYLGFSHKNRDINDYHHAQDALCVGIAGQFAANRGFFADGEVSDGAQNSYNQYLRDYLRGYREKLSAEDRKQGRAFGFIVGSMRSQDEQKRVNPRTGEVVWSEEDKDYLRKVMNYRKMLVTQKVGDDFGALYDETRYAATDPKGIKGIPFDGAKQDTSLYGGFSSAKPAYAVLIESKGKTRLVNVTMQEYSLLGDRPSDDELRKVLAKKKSEYAKANILLRHVPKMQLIRYGGGLMVIKSAGELNNAQQLWLPYEEYCYFDDLSQGKGSLEKDDLKKLLDSILGSVQCLYPWHRFTEEELADLHVAFDKLPEDEKKNVITGIVSALHADAKTANLSIVGMTGSWRRMNNKSGYTFSDEDEFIFQSPSGLFEKRVTVGELKRKAKKEVNSKYRTNEKRLPTLSGASQP

SEQ ID NO: 313 - protein, 1121 aa, Bifidobacterium dentium
MSVGLAAIEVDETGFPIRILNIQSVIHDGGIDPQLGKKKSISRKAISGVARRTRRMRRRKVVRLRQLDATLESLGFPIVEPDSLDTWEIWLTRAKLASSYIQDDETRKEDVSIALRHIARHRGWRNPYSNVESLFVDVAPSEQYEELRRKAEEKLGTSLSGNPTSAEIVECILKRQVGEVQLRTRSRKGVNGNAVEKEGLLPTKLMQSDNAAEIRRIFKVQRIDDETGRKLLRAVFKACSPKGSVERRVGRDALAPGLPRALKASLAFQEYRIANVLTNLVISEDGTKRKLTIAEKQRVFGFLSSNETDDITWIDVAEKLGLERRQIQGVGCLTADGEERISSTPPRNITALHIHSAKPVIREKLVAWWKAASPTVRETMVELLSNTVDIDRVREDMDYSSAVAFIDSLGDEELTALDSVDLLSGRAAYSRQTLKQLTERMLNTDDDLHEARKAVFGVDDNWKPPVDAISTSVGNPAVDRVLKIVNRYLLACQKRWRNPQSVQIEHVRESFSSVAKAKETERVQGERARYRNDLRRELCEQEGLNKIRESDIRRWESVQRQNGTCLYCGSPITFRTCEMDHIVPRKGVGSTNTRVNLAAACAACNKLKSNTAFSVWARTEGAANRKVSQRDAIERVKTFIFNKSVPPREQRAFKQAVISRLRQAESDPAIDNRSIESVAWMADELHRRIEAYFNQDADVSGNTPATQVWVFQGRVTALARKASGIEGRIHFAGEWKKTRLDRRHHAVDAAVIAMMNHSAAQTLVERDSLRLSQWITRKPETWKNYPFSEGQKKTRFKEWLDCMNALLDLLNDALDSDRVPVTRCQRMSLGNSQAHAATIRKMKRVELFSPMDADLIRRASTPALYCALTRLPEYSPEKGLPENRGREIVLNGRHIRSTETVDFFASGAAQLMVRNGSAEIGDSIHHMRIYRYRKTGAKSQEYVYGMIRVFQIDLLHASSENLFAVQLPSQSVSVRYGDKNVVQAIQEGRAEYLGHIVPNDEILISYEGVRMKDSEKIGAYANDFSGTASELAQRRHWVVVGSDVSKLALRPSYLSEEGLENSGSESERLSKQTRKVIEGKGWVVAVNILAKYHPVVIRRNALGEPRFRTNSGMPVSWRWDR

SEQ ID NO: 314 - protein, 354 aa, Bifidobacterium longum
AKQYVNSASIDDAEAETMKTTVSVFQGRVTASARRAAGIEGKIHFIGQQSKTRLDRRHHAVDASVIAMMNTAAAQTLMERESLRESQRLIGLMPGERSWKEYPYEGTSRYESFHLWLDNMDVLLELLNDALDNDRIAVMQSQRYVLGNSIAHDATIHPLEKVPLGSAMSADLIRRASTPALWCALTRLPDYDEKEGLPEDSHREIRVHDTRYSADDEMGFFASQAAQIAVQEGSADIGSAIHHARVYRCWKTNAKGVRKYFYGMIRVFQTDLLRACHDDLFTVPLPPQSISMRYGEPRVVQALQSGNAQYLGSLVVGDEIEMDFSSLDVDGQIGEYLQFFSQFSGGNLAWKHWV

SEQ ID NO: 315 - protein, 1124 aa, Bifidobacterium longum
LTGHSGHTFWPTSSSPPIQLEQEKRPLPQRNTSQNGHTFWPITRERCFMRGKRYRIGIDVGLNSVGLAAVEVSDENSPVRLLNAQSVIHDGGVDPQKNKEAITRKNMSGVARRTRRMRRRKRERLHKLDMLLGKFGYPVIEPESLDKPFEEWHVRAELATRYIEDDELRRESISIALRHMARHRGWRNPYRQVDSLISDNPYSKQYGELKEKAKAYNDDATAAEEESTPAQLVVAMLDAGYAEAPRLRWRTGSKKPDAEGYLPVRLMQEDNANELKQIFRVQRVPADEWKPLFRSVFYAVSPKGSAEQRVGQDPLAPEQARALKASLAFQEYRIANVITNLRIKDASAELRKLTVDEKQSIYDQLVSPSSEDITWSDLCDFLGFKRSQLKGVGSLTEDGEERISSRPPRLTSVQRIYESDNKIRKPLVAWWKSASDNEHEAMIRLLSNTVDIDKVREDVAYASAIEFIDGLDDDALTKLDSVDLPSGRAAYSVETLQKLTRQMLTTDDDLHEARKTLFNVTDSWRPPADPIGEPLGNPSVDRVLKNVNRYLMNCQQRWGNPVSVNIEHVRSSFSSVAFARKDKREYEKNNEKRSIFRSSLSEQLRADEQMEKVRESDLRRLEAIQRQNGQCLYCGRTITFRTCEMDHIVPRKGVGSTNTRTNFAAVCAECNRMKSNTPFAIWARSEDAQTRGVSLAEAKKRVTMFTFNPKSYAPREVKAFKQAVIARLQQTEDDAAIDNRSIESVAWMADELHRRIDWYFNAKQYVNSASIDDAEAETMKTTVSVFQGRVTASARRAAGIEGKIHFIGQQSKTRLDRRHHAVDASVIAMMNTAAAQTLMERESLRESQRLIGLMPGERSWKEYPYEGTSRYESFHLWLDNMDVLLELLNDALDNDRIAVMQSQRYVLGNSIAHDATIHPLEKVPLGSAMSADLIRRASTPALWCALTRLPDYDEKEGLPEDSHREIRVHDTRYSADDEMGFFASQAAQIAVQEGSADIGSAIHHARVYRCWKTNAKGVRKYFYGMIRVFQTDLLRACHDDLFTVPLPPQSISMRYGEPRVVQALQSGNAQYLGSLVVGDEIEMDFPVSMLMVRLASIYNSSRSLVEGTLHGNIGLLMDSLTRRS

SEQ ID NO: 316 - protein, 166 aa, Bifidobacterium longum
MGLAAVEVSDENSPVRLLNAQSVIHDGGVDPQKNKEAITRKNMSGVARRTRRMRRRKRERLHKLDMLLGKFGYPVIEPESLDKPFEEWHVRAELATRYIEDDELRRESISIALRHMARHRGWRNPYRQVDSLISDNPYSKQYGELKEKAKAYNDDATAAEEESTPA

SEQ ID NO: 317 - protein, 1138 aa, Bifidobacterium longum
MNSVGLAAVEVSDENSPVRLLNAQSVIHDGGVDPQKNKEAITRKNMSGVARRTRRMRRRKRERLHKLDMLLGKFGYPVIEPESLDKPFEEWHVRAELATRYIEDDELRRESISIALRHMARHRGWRNPYRQVDSLISDNPYSKQYGELKEKAKAYNDDATAAEEESTPAQLVVAMLDAGYAEAPRLRWRTGSKKPDAEGYLPVRLMQEDNANELKQIFRVQRVPADEWKPLFRSVFYAVSPKGSAEQRVGQDPLAPEQARALKASLAFQEYRIANVITNLRIKDASAELRKLTVDEKQSIYDQLVSPSSEDITWSDLCDFLGFKRSQLKGVGSLTEDGEERISSRPPRLTSVQRIYESDNKIRKPLVAWWKSASDNEHEAMIRLLSNTVDIDKVREDVAYASAIEFIDGLDDDALTKLDSVDLPSGRAAYSVETLQKLTRQMLTTDDDLHEARKTLFNVTDSWRPPADPIGEPLGNPSVDRVLKNVNRYLMNCQQRWGNPVSVNIEHVRSSFSSVAFARKDKREYEKNNEKRSIFRSSLSEQLRADEQMEKVRESDLRRLEAIQRQNGQCLYCGRTITFRTCEMDHIVPRKGVGSTNTRTNFAAVCAECNRMKSNTPFAIWARSEDAQTRGVSLAEAKKRVTMFTFNPKSYAPREVKAFKQAVIARLQQTEDDAAIDNRSIESVAWMADELHRRIDWYFNAKQYVNSASIDDAEAETMKTTVSVFQGRVTASARRAAGIEGKIHFIGQQSKTRLDRRHHAVDASVIAMMNTAAAQTLMERESLRESQRLIGLMPGERSWKEYPYEGTSRYESFHLWLDNMDVLLELLNDALDNDRIAVMQSQRYVLGNSIAHDATIHPLEKVPLGSAMSADLIRRASTPALWCALTRLPDYDEKEGLPEDSHREIRVHDTRYSADDEMGFFASQAAQIAVQEGSADIGSAIHHARVYRCWKTNAKGVRKYFYGMIRVFQTDLLRACHDDLFTVPLPPQSISMRYGEPRVVQALQSGNAQYLGSLVVGDEIEMDFSSLDVDGQIGEYLQFFSQFSGGNLAWKHWVVDGFFNQTQLRIRPRYLAAEGLAKAFSDDVVPDGVQKIVTKQGWLPPVNTASKTAVRIVRRNAFGEPRLSSAHHMPCSWQWRHE

SEQ ID NO: 318 - protein, 182 aa, Bifidobacterium longum
MRGKRYRIGIDVGLNSVGLAAVEVSDENSPVRLLNAQSVIHDGGVDPQKNKEAITRKNMSGVARRTRRMRRRKRERLHKLDMLLGKFGYPVIEPESLDKPFEEWHVRAELATRYIEDDELRRESISIALRHMARHRGWRNPYRQVDSLISDNPYSKQYGELKEKAKAYNDDATAAEEESTPA

SEQ ID NO: 319 - protein, 441 aa, Bifidobacterium longum
MVAMLDAGYAEAPRLRWRTGSKKPDAEGYLPVRLMQEDNANELKQIFRVQRVPADEWKPLFRSVFYAVSPKGSAEQRVGQDPLAPEQARALKASLAFQEYRIANVITNLRIKDASAELRKLTVDEKQSIYDQLVSPSSEDITWSDLCDFLGFKRSQLKGVGSLTEDGEERISSRPPRLTSVQRIYESDNKIRKPLVAWWKSASDNEHEAMIRLLSNTVDIDKVREDVAYASAIEFIDGLDDDALTKLDSVDLPSGRAAYSVETLQKLTRQMLTTDDDLHEARKTLFNVTDSWRPPADPIGEPLGNPSVDRVLKNVNRYLMNCQQRWGNPVSVNIEHVRSSFSSVAFARKDKREYEKNNEKRSIFRSSLSEQLRADEQMEKVRESDLRRLEAIQRQNGQCLYCGRTITFRTCEMDHIVPRKGVGSTNTRTNFAAVCAECNRM

SEQ ID NO: 320 - protein, 967 aa, Bifidobacterium longum
MVAMLDAGYAEAPRLRWRTGSKKPDAEGYLPVRLMQEDNANELKQIFRVQRVPADEWKPLFRSVFYAVSPKGSAEQRVGQDPLAPEQARALKASLAFQEYRIANVITNLRIKDASAELRKLTVDEKQSIYDQLVSPSSEDITWSDLCDFLGFKRSQLKGVGSLTEDGEERISSRPPRLTSVQRIYESDNKIRKPLVAWWKSASDNEHEAMIRLLSNTVDIDKVREDVAYASAIEFIDGLDDDALTKLDSVDLPSGRAAYSVETLQKLTRQMLTTDDDLHEARKTLFNVTDSWRPPADPIGEPLGNPSVDRVLKNVNRYLMNCQQRWGNPVSVNIEHVRSSFSSVAFARKDKREYEKNNEKRSIFRSSLSEQLRADEQMEKVRESDLRRLEAIQRQNGQCLYCGRTITFRTCEMDHIVPRKGVGSTNTRTNFAAVCAECNRMKSNTPFAIWARSEDAQTRGVSLAEAKKRVTMFTFNPKSYAPREVKAFKQAVIARLQQTEDDAAIDNRSIESVAWMADELHRRIDWYFNAKQYVNSASIDDAEAETMKTTVSVFQGRVTASARRAAGIEGKIHFIGQQSKTRLDRRHHAVDASVIAMMNTAAAQTLMERESLRESQRLIGLMPGERSWKEYPYEGTSRYESFHLWLDNMDVLLELLNDALDNDRIAVMQSQRYVLGNSIAHDATIHPLEKVPLGSAMSADLIRRASTPALWCALTRLPDYDEKEGLPEDSHREIRVHDTRYSADDEMGFFASQAAQIAVQEGSADIGSAIHHARVYRCWKTNAKGVRKYFYGMIRVFQTDLLRACHDDLFTVPLPPQSISMRYGEPRVVQALQSGNAQYLGSLVVGDEIEMDFSSLDVDGQIGEYLQFFSQFSGGNLAWKHWVVDGFFNQTQLRIRPRYLAAEGLAKAFSDDVVPDGVQKIVTKQGWLPPVNTASKTAVRIVRRNAFGEPRLSSAHHMPCSWQWRHE

SEQ ID NO: 321 - protein, 1151 aa, Bifidobacterium sp.
MRGKRYRIGIDVGLNSVGLAAVEVSDENSPVRLLNAQSVIHDGGVDPQKNKEAITRKNMSGVARRTRRMRRRKRERLHKLDMLLGKFGYPVIEPESLDKPFEEWHVRAELATRYIEDDELRRESISIALRHMARHRGWRNPYRQVDSLISDNPYSKQYGELKEKAKAYNDDATAAEEESTPAQLVVAMLDAGYAEAPRLRWRTGSKKPDAEGYLPVRLMQEDNANELKQIFRVQRVPADEWKPLFRSVFYAVSPKGSAEQRVGQDPLAPEQARALKASLAFQEYRIANVITNLRIKDASAELRKLTVDEKQSIYDQLVSPSSEDITWSDLCDFLGFKRSQLKGVGSLTEDGEERISSRPPRLTSVQRIYESDNKIRKPLVAWWKSASDNEHEAMIRLLSNTVDIDKVREDVAYASAIEFIDGLDDDALTKLDSVDLPSGRAAYSVETLQKLTRQMLTTDDDLHEARKTLFNVTDSWRPPADPIGEPLGNPSVDRVLKNVNRYLMNCQQRWGNPVSVNIEHVRSSFSSVAFARKDKREYEKNNEKRSIFRSSLSEQLRADEQMEKVRESDLRRLEAIQRQNGQCLYCGRTITFRTCEMDHIVPRKGVGSTNTRTNFAAVCAECNRMKSNTPFAIWARSEDAQTRGVSLAEAKKRVTMFTFNPKSYAPREVKAFKQAVIARLQQTEDDAAIDNRSIESVAWMADELHRRIDWYFNAKQYVNSASIDDAEAETMKTTVSVFQGRVTASARRAAGIEGKIHFIGQQSKTRLDRRHHAVDASVIAMMNTAAAQTLMERESLRESQRLIGLMPGERSWKEYPYEGTSRYESFHLWLDNMDVLLELLNDALDNDRIAVMQSQRYVLGNSIAHDATIHPLEKVPLGSAMSADLIRRASTPALWCALTRLPDYDEKEGLPEDSHREIRVHDTRYSADDEMGFFASQAAQIAVQEGSADIGSAIHHARVYRCWKTNAKGVRKYFYGMIRVFQTDLLRACHDDLFTVPLPPQSISMRYGEPRVVQALQSGNAQYLGSLVVGDEIEMDFSSLDVDGQIGEYLQFFSQFSGGNLAWKHWVVDGFFNQTQLRIRPRYLAAEGLAKAFSDDVVPDGVQKIVTKQGWLPPVNTASKTAVRIVRRNAFGEPRLSSAHHMPCSWQWRHE

SEQ ID NO: 322 - protein, 1092 aa, Brevibacillus laterosporus
MAYTMGIDVGIASCGWAIVDLERQRIIDIGVRTFEKAENPKNGEALAVPRREARSSRRRLRRKKHRIERLKYMFVRNGLAVDIQHLEQTLRSQNEIDVWQLRVDGLDRMLTQKEWLRVLIHLAQRRGFQSNRKTDGSSEDGQVLVNVTENDRLMEEKDYRTVAEMMVKDEKFSDHKRNKNGNYHGVVSRASLLVEIHTLFESQRQHHNFLASKDFELEYINIWSSQRPVATKDQIEKMIGTCTFLPKEKRAPKASWHFQYFMLLQTINHIRITNAQGTRPLNKEEIEQVVNMALTKSKVSYHDIRKVLDLSEEYQFVGLDYGKEDEKKKVESKETIIKLDDYHKLNKIFNEVELAKGETWEAVDYDTVAYALTFFKDDEDIRDYLQNKYKDSKNRLVKNVANKEYTNELIEKVSTLSFRKVGHLSLKALRKIIPFLEQGMTYDKACQAAGFNFQGISKKKRSVVLPVIDQISNPVVNRALTQTRKVINALIKKYGSPETIHIETARELSKRFDERKNITKDYKENRDKNERAKKHLSELGIINPTGLDIVKYKLWCEQQGRCMYSNQPISFERLRESGYTEVDHIIPYSRSMNDSYNNRVLVMTRENREKSNQTPYEYMGNDTQRWDEFEQRVTTNPQIKKEKRQNLLLKGFTNRRELEMLERNLNDTRHITKYLSHFISTNLEFSPSDKKKKVVNTSGRITSHLRSRWGLEKNREQNDLHHAMDAVVIAVTSDSFIQQVTNYYKRKERRELNGDDKFPLPWKFFREEVIARLSPNPKEQIEALPNHFYSEDELADLQPIFVSRMPKRSITGEAHQAQFRRVVGKTKEGKNITAKKTALVDISYDKNGDFNMYGRETDPATYEAIKERYLEFGGNAKKAFSTDLHKPKKDGTKGPLIKSVRIMENKTLVHPVNKGKGVVYNSSIVRTDVFQRKEKYYLLPVYVTDVTKGKLPNKVIAAKKGYDDWIEVDDSFTFLYSLYPNDLIFIRQNPKKKISLKKRIESHSISDSKEVQEILTYYKGVDSSTAAIEFITHDGSYYAKGVGVQNLDCFEKYQVDILGNYSKVKGEKRLELETSDNNHKGKDVNSIKSTSR

SEQ ID NO: 323 - protein, 103 aa, Butyrivibrio fibrisolvens
MISVGQSRKDLEDLGYEFKLSFYKEDIIEYEKNGDILVERFLSRTMPQVRNYIETKPIDRPKYDKRNPVGLSKTSSIRKITMDILGNRFYVDKMSFNNVVGTQ

SEQ ID NO: 324 - protein, 177 aa, Butyrivibrio fibrisolvens
MLIAFSQMGYDAYHELTNKYIDFETGEIIDKEGFNELLNNDLVYKNTMYESKWLKIKGNIEKAAEKNKYWYQVNKKCNRGLCNQTVYGTRESDGDVYKISKIDIRTDDGFKKFKNIVDKGNESVFLMYENDPKTFELIMDIYKNYSDSKNPFVQYEKETGDIIRKYSKKITGQRFLN

SEQ ID NO: 325 - protein, 1442 aa, Caenispirillum salinarum
MPVLSPLSPNAAQGRRRWSLALDIGEGSIGWAVAEVDAEGRVLQLTGTGVTLFPSAWSNENGTYVAHGAADRAVRGQQQRHDSRRRRLAGLARLCAPVLERSPEDLKDLTRTPPKADPRAIFFLRADAARRPLDGPELFRVLHHMAAHRGIRLAELQEVDPPPESDADDAAPAATEDEDGTRRAAADERAFRRLMAEHMHRHGTQPTCGEIMAGRLRETPAGAQPVTRARDGLRVGGGVAVPTRALIEQEFDAIRAIQAPRHPDLPWDSLRRLVLDQAPIAVPPATPCLFLEELRRRGETFQGRTITREAIDRGLTVDPLIQALRIRETVGNLRLHERITEPDGRQRYVPRAMPELGLSHGELTAPERDTLVRALMHDPDGLAAKDGRIPYTRLRKLIGYDNSPVCFAQERDTSGGGITVNPTDPLMARWIDGWVDLPLKARSLYVRDVVARGADSAALARLLAEGAHGVPPVAAAAVPAATAAILESDIMQPGRYSVCPWAAEAILDAWANAPTEGFYDVTRGLFGFAPGEIVLEDLRRARGALLAHLPRTMAAARTPNRAAQQRGPLPAYESVIPSQLITSLRRAHKGRAADWSAADPEERNPFLRTWTGNAATDHILNQVRKTANEVITKYGNRRGWDPLPSRITVELAREAKHGVIRRNEIAKENRENEGRRKKESAALDTFCQDNTVSWQAGGLPKERAALRLRLAQRQEFFCPYCAERPKLRATDLFSPAETEIDHVIERRMGGDGPDNLVLAHKDCNNAKGKKTPHEHAGDLLDSPALAALWQGWRKENADRLKGKGHKARTPREDKDFMDRVGWRFEEDARAKAEENQERRGRRMLHDTARATRLARLYLAAAVMPEDPAEIGAPPVETPPSPEDPTGYTAIYRTISRVQPVNGSVTHMLRQRLLQRDKNRDYQTHHAEDACLLLLAGPAVVQAFNTEAAQHGADAPDDRPVDLMPTSDAYHQQRRARALGRVPLATVDAALADIVMPESDRQDPETGRVHWRLTRAGRGLKRRIDDLTRNCVILSRPRRPSETGTPGALHNATHYGRREITVDGRTDTVVTQRMNARDLVALLDNAKIVPAARLDAAAPGDTILKEICTEIADRHDRVVDPEGTHARRWISARLAALVPAHAEAVARDIAELADLDALADADRTPEQEARRSALRQSPYLGRAISAKKADGRARAREQEILTRALLDPHWGPRGLRHLIMREARAPSLVRIRANKTDAFGRPVPDAAVWVKTDGNAVSQLWRLTSVVTDDGRRIPLPKPIEKRIEISNLEYARLNGLDEGAGVTGNNAPPRPLRQDIDRLTPLWRDHGTAPGGYLGTAVGELEDKARSALRGKAMRQTLTDAGITAEAGWRLDSEGAVCDLEVAKGDTVKKDGKTYKVGVITQGIFGMPVDAAGSAPRTPEDCEKFEEQYGIKPWKAKGIPLA

SEQ ID NO: 326 - protein, 984 aa, Campylobacter coli
MARILAFDIGISSIGWAFSENDELKDCGVRIFTKAENPKTGESLALPRRLARSARKCLARRKARLNHLKHLIANEFKLNYEDYQSFDESLAKAYKGSLISPYELRFRALNELLSKQDFARVILHIAKRRGYDDIKNNGDEEKSEILKAIKQNEEKLVNYQSVGEYLYKEYFQKFKENSKEFINVRNKKESYERCIAQSFLKDELKLIFQKQREFGFSFSKKFEEEVLSVAFYKRALKDFSHLVGNCSFFTDEKRAPKNSPLAFMFVALTRIINLLNNLKNTEGILYTKDDLNALLNEVLKNGTLTYKQTKKLLGLSDDYEFKGEKGTYFIEFKKYKEFIKALGEHNLSQDDLNEIAKDITLIKDEIKLKKALAKYDLNQNQIDSLSKLEFKDHLNISFKALKLITPLMLEGKKYDEACNELNLKVAINEDKKDFLPAFNETYYKDEVTNPVVLRAIKEYRKVLNALLKKYGKVHKINIELAREVGKNHSQRAKIEKEQNENYKAKKDAELECEKLGLKINSKNILKLRLFKEQKEFCAYSGEKIKISDLQDEKMLEIDHIYPYSRSFDDSYMNKVLVFTKQNQEKLNQTPFEAFGNDSAKWQKIEVLAKNLPTKKQKRILDKNYKDKEQKNFKDRNLNDTRYIARLVLNYTKDYLDFLPLSDDENTKLNDTQKGSKVHVEAKSGMLTSALRHTWGFSAKDRNNHLHHAIDAVIIAYANNSIVKAFSDFKKEQESNSAELYAKKISELDYKNKRKFFEPFSGFRQKVLDKIDEIFVSKPERKKPSGALHEETFRKEEEFYQSYGGKEGVLKALELGKIRKVNGKIVKNGDMFRVDIFKHKKTNKFYAVPIYTMDFALKVLPNKAVARSKKGEIKDWILMDENYEFCFSLYKDSLILIQTKDMQEPEFVYYNAFTSSTVSLIVSKHDNKFETLSKNQKILFKNANEKEVIAKSIGIQNLKVFEKYIVSALGEVTKAEFRQREDFKK

SEQ ID NO: 327 - protein, 984 aa, Campylobacter coli
MARILAFDIGISSIGWAFSENDELKDCGVRIFTKAENPKTGESLALPRRLARSARKRLARRKARLNHLKHLIANEFKLNYEDYQSFDESLAKAYKGSLISPYELRFRALNELLSKQDFARVILHIAKRRGYDDIKNNGDEEKGKILKAIKQNEEKLVNYQSVGEYLYKEYFQKFKENSKEFINVRNKKESYERCITQSFLKYELKLIFQKQREFGFSFSKKFEEEVLSVAFYKRALKDFSHLVGNCSFFSDEKRAPKNSPLAFMFVALTRIINLLNNLKNTEGILYTKDDLNALLNEVLKNGTLTYKQTKKLLGLSDDYEFKGEKGTYFIEFKKYKEFIKALGEHNLSQDDLNEIAKDITLIKDEIKLKKALAKYDLNQNQIDSLSKLEFKDHLNISFKALKLITPLMLEGKKYDEACNELNLKVAINEDKKDFLPAFNETYYKDEVTNPVVLRAIKEYRKVLNALLKKYGKVHKINIELAREVGKNYSQRAKIEKEQNENYKAKKDAELECEKLGLKINSKNILKLRLFKEQKEFCAYSGEKIKISDLQDEKMLEIDHIYPYSRSFDDSYMNKVLVFTKQNQEKLNQTPFEAFGNDSAKWQKIEVLAKNLPTKKQKRILDKNYKDKEQKNFKDRNLNDTRYIARLVLNYTKDYLDFLPLSDDENTKLNDTQKGSKVHVEAKSGMLTSALRHTWGFSAKDRNNHLHHAIDAVIIAYANNSIVKAFSDFKKEQESNSAELYAKKISELDYKNKRKFFEPFSGFRQKVLDKIDEIFVSKPERKKPSGALHEETFRKEEEFYQSYGGKEGVLKALELGKIRKVNGKIVKNGDMFRVDIFKHKKTNKFYAVPIYTMDFALKVLPNKAVARSKKGEIKDWILMDENYEFCFSLYKDSLILIQTKDMQEPEFVYYNAFTSSTVSLIVSKHDNKFETLSKNQKILFKNANEKEVIAKSIGIQNLKVFEKYIVSALGEVTKAEFRQREDFKK

SEQ ID NO: 328 - protein, 984 aa, Campylobacter coli
MARILAFDIGISSIGWAFSENDELKDCGVRIFTKAENPKTGESLALPRRLARSARKRLARRKARLNHLKHLIANEFKLNYEDYQSFDESLAKAYKGSLISPYELRFRALNELLSKQDFARVILHIAKRRGYDDIKNNGDEEKSEILKAIKQNEEKLVNYQSVGEYLYKEYFQKFKENSKEFINVRNKKESYERCIAQSFLKDELKLIFQKQREFGFSFSKKFEEEVLSVAFYKRALKDFSHLVGNCSFFTDEKRAPKNSPLAFMFVALTRIINLLNNLKNTEGILYTKDDLNTLLNEVLKNGTLTYKQTKKLLGLSDDYEFKGEKGTYFIEFKKYKEFIKALGEHNLSQDNLNEIAKDITLIKDEIKLKKALAKYDLNQNQIDSLSKLEFKDHLNISFKALKLITPLMLEGKKYDEAYNELNLKVAINEDKKDFLPAFNETYYKDEVTNPVVLRAIKEYRKVLNALLKKYGKVHKINIELAREVGKNHSQRAKIEKEQNENYKAKKDAELECEKLGLKINSKNILKLRLFKEQKEFCAYSGEKIKISDLQDEKMLEIDHIYPYSRSFDDSYMNKVLVFTKQNQEKLNQTPFEAFGNDSAKWQKIEVLAKNLPTKKQKRILDKNYKDKEQKDFKDRNLNDTRYIARLVLNYTKDYLDFLPLSDDENTKLNDTQKGSKVHVEAKSGMLTSALRHTWGFSAKDRNNHLHHAIDAVIIAYANNSIVKAFSDFKKEQESNSAELYAKKISELDYKNKRKFFEPFSGFRQKVLDKIDEIFVSKPERKKPSGALHEETFRKEEEFYQSYGGKEGVLKALELGKIRKVNGKIVKNGDMFRVDIFKHKKTNKFYAVPIYTMDFALKVLPNKAVARSKKGEIKDWILMDENYEFCFSLYKDSLILIQTKDMQEPELVYFNAFTSSTVSLIVSKHDNKFETLSKNQKILFKNANEKEVIAKSIGIQNLKVFEKYIVSALGEVTKAEFRQREDFKK

SEQ ID NO: 329 - protein, 984 aa, Campylobacter coli
MARILAFDIGISSIGWAFSENDELKDCGVRIFTKAENPKTGESLALPRRLARSARKRLARRKARLNHLKHLIANEFKLNYEDYQSFDESLAKAYKGSLISPYELRFRALNELLSKQDFARVILHIAKRRGYDDIKNNGDEEKSEILKAIKQNEEKLVNYQSVGEYLYKEYFQKFKENSKEFINVRNKKESYERCIAQSFLKDELKLIFQKQREFGFSFSKKFEEEVLSVAFYKRALKDFSHLVGNCSFFTDEKRAPKNSPLAFMFVALTRIINLLNNLKNTEGILYTKDDLNALLNEVLKNGTLTYKQTKKLLGLSDDYEFKGEKGTYFIEFKKYKEFIKALGEHNLSQDDLNEIAKDITLIKDEIKLKKALAKYDLNQNQIDSLSKLEFKDHLNISFKALKLITPLMLEGKKYDEACNELNLKVAINEDKKDFLPAFNETYYKDEVTNPVVLRAIKEYRKVLNALLKKYGKVHKINIELAREVGKNYSQRAKIEKEQNENYKAKKDAELECEKLGLKINSKNILKLRLFKEQKEFCAYSGEKIKISDLQDEKMLEIDHIYPYSRSFDDSYMNKVLVFTKQNQEKLNQTPFEAFGNDSAKWQKIEVLAKNLPTKKQKRILDKNYKDKEQKNFKDRNLNDTRYIARLVLNYTKDYLDFLPLSDDENTKLNDTQKGSKVHVEAKSGMLTSALRHTWGFSAKDRNNHLHHAIDAVIIAYANNSIVKAFSDFKKEQESNSAELYAKKISELDYKNKRKFFEPFSGFRQKVLDKIDEIFVSKPERKKPSGALHEETFRKEEEFYQSYGGKEGVLKALELGKIRKVNGKIVKNGDMFRVDIFKHKKTNKFYAVPIYTMDFALKVLPNKAVARSKKGEIKDWILMDENYEFCFSLYKDSLILIQTKDMQEPEFVYYNAFTSSTVSLIVSKHDNKFETLSKNQKILFKNANEKEVIAKSIGIQNLKVFEKYIVSALGEVTKAEFRQREDFKK

SEQ ID NO: 330 - protein, 987 aa, Campylobacter coli
MARILAFDIGISSIGWAFSENDELKDCGVRIFTKAENPKTGESLALPRRLARSARKRLARRKARLNHLKHLIANEFKLNYEDYQSFDESLAKAYKGSLISPYELRFRALNELLSKQDFARVILHIAKRRGYDDIKNNGDEEKSEILKAIKQNEEKLVNYQSVGEYLYKEYFQKFKENSKEFINVRNKKESYERCIAQSFLKDELKLIFQKQREFGFSFSKKFEEEVLSVAFYKRALKDFSHLVGNCSFFTDEKRAPKNSPLAFMFVALTRIINLLNNLKNTEGILYTKDDLNTLLNEVLKNGTLTYKQTKKLLGLSDDYEFKGEKGTYFIEFKKYKEFIKALGEHNLSQDNLNEIAKDITLIKDEIKLKKALAKYDLNQNQIDSLSKLEFKDHLNISFKALKLITPLMLEGKKYDEAYNELNLKVAINEDKKDFLPAFNETYYKDEVTNPVVLRAIKEYRKVLNALLKKYGKVHKINIELAREVGKNHSQRAKIEKEQNENYKAKKDAELECEKLGLKINSKNILKLRLFKEQKEFCAYSGEKIKISDLQDEKMLEIDHIYPYSRSFDDSYMNKVLVFTKQNQEKLNQTPFEAFGNDSAKWQKIEVLAKNLPTKKQKRILDKNYKDKEQKDFKDRNLNDTRYIARLVLNYTKDYLDFLPLSDDENTKLNDTQKGSKVHVEAKSGMLTSALRHTWGFSAKDRNNHLHHAIDAVIIAYANNSIVKAFSDFKKEQESNSAELYAKKISELDYKNKRKFFEPFSGFRQKVLDKIDEIFVSKPERKKPSGALHEETFRKEEEFYQSYGGKEGVLKALELGKIRKVNGKIVKNGDMFRVDIFKHKKTNKFYAVPIYTMDFALKVLPNKAVARSKKGEIKDWILMDENYEFCFSLYKDSLILIQTKDMQEPELVYFNAFTSSTVSLIVSKHDNKFETLSKNQKILFKNANEKEVIAKSIGIQNLKVFEKYIVSALGEVTKAEFRQREDFKNELR

SEQ ID NO: 331 - protein, 984 aa, Campylobacter coli
MARILAFDIGISSIGWAFSENDELKDCGVRIFTKAENPKTGESLALPRRLARSARKRLARRKARLNHLKHLIANEFKLNYEDYQSFDESLAKAYKGSLISPYELRFRALNELLSKQDFARVILHIAKRRGYDDIKNNGDEEKSEILKAIKQNEEKLVNYQSVGEYLYKEYFQKFKENSKEFINVRNKKESYERCIAQSFLKDELKLIFQKQREFGFSFSKKFEEEVLSVAFYKRALKDFSHLVGNCSFFTDEKRAPKNSPLAFMFVALTRIINLLNNLKNTEGILYTKDDLNTLLNEVLKNGTLTYKQTKKLLGLSDDYEFKGEKGTYFIEFKKYKEFIKALGEHNLSQDNLNEIAKDITLIKDEIKLKKALAKYDLNQNQIDSLSKLEFKDHLNISFKALKLITPLMLEGKKYDEAYNELNLKVAINEDKKDFLPAFNETYYKDEVTNPVVLRAIKEYRKVLNALLKKYGKVHKINIELAREVGKNHSQRAKIEKEQNENYKAKKDAELECEKLGLKINSKNILKLRLFKEQKEFCAYSGEKIKISDLQDEKMLEIDHIYPYSRSFDDSYMNKVLVFTKQNQEKLNQTPFEAFGNDSAKWQKIEVLAKNLPTKKQKRILDKNYKDKEQKDFKDRNLNDTRYIARLVLNYTKDYLDFLPLSNDENTKLNDTQKGSKVHVEAKSGMLTSALRHTWGFSAKDRNNHLHHAIDAVIIAYANNSIVKAFSDFKKEQESNSAELYAKKISELDYKNKRKFFEPFSGFRQKVLDKIDEIFVSKPERKKPSGALHEETFRKEEEFYQSYGGKEGVLKALELGKIRKVNGKIVKNGDMFRVDIFKHKKTNKFYAVPIYTMDFALKVLPNKAVARSKKGEIKDWILMDENYEFCFSLYKDSLILIQTKDMQEPELVYFNAFTSSTVSLIVSKHDNKFETLSKNQKILFKNANEKEVIAKSIGIQNLKVFEKYIVSALGEVTKAEFRQREDFKK

SEQ ID NO: 332 - protein, 987 aa, Campylobacter coli
MARILAFDIGISSIGWAFSENDELKDCGVRIFTKAENPKTGESLALPRRLARSARKRLARRKARLNHLKHLIANEFKLNYEDYQSFDESLAKAYKGSLISPYELRFRALNELLSKQDFARVILHIAKRRGYDDIKNSDDKEKGAILKAIKQNEEKLANYQSVGEYLYKEYFQKFKENSKEFTNVRNKKESYERCIAQSFLKDELKLIFKKQREFGFSFSKKFEEEVLSVAFYKRALKDFSHLVGNCSFFTDEKRAPKNSPLAFMFVALTRIINLLNNLKNTEGILYTKDDLNALLNEVLKNGTLTYKQTKKLLGLSDDYEFKGEKGTYFIEFKKYKEFIKALGDHSLSQDDLNEIAKDITLIKDEIKLKKALAKYDLNQNQIDSLSKLEFKDHLNISFKALKLITPLMLEGKKYDEACNELNLKVAINEDKKDFLPAFNETYYKDEVTNPVVLRAIKEYRKVLNALLKKYGKVHKINIELAREVGKNYSQRAKIEKEQNENYKAKKDAELECEKLGLKINSKNILKLRLFKEQKEFCAYSGEKIKISDLQDEKMLEIDHIYPYSRSFDDSYMNKVLVFTKQNQEKLNKTPFEAFGNDSTKWQKIEVLAKNLPEKKQKRILDKNYKDKEQKDFKDRNLNDTRYIARLVLNYTKDYLDFLPLSDDENTKLNDTQKGSKVHVEAKSGMLTSALRHTWGFSTKDRNNHLHHAIDAVIIAYANNSIVKAFSDFKKEQESNSAELYAKKISELDYKNKRKFFEPFSGFRQKVLDKIDEIFVSKPERKKPSGALHEETFRKEEEFYQSYGGKEGVLKALELGKIRKVNGKIVKNGDMFRVDIFKHKKTNKFYAVPIYTMDFALKVLPNKAVARSKKGEIKDWILMDENYEFCFSLYKDSLILIQTKDMQEPEFVYYNAFTSSTVSLIVSKHDNKFETLSKNQKILFKNANEKEVIAKSIGIQNLKVFEKYIVSALGEVTKAEFRQREDFKNELR

SEQ ID NO: 333 - protein, 984 aa, Campylobacter coli
MARILAFDIGISSIGWAFSENDELKDCGVRIFTKAENPKTGESLALPRRLARSARKRLARRKARLNHLKHLIANEFKLNYEDYQSFDESLAKAYKGSLISPYELRFRALNELLSKQDFARVILHIAKRRGYDDIKNSDDKEKGAILKAIKQNEEKLTNYQSVGEYLYKEYFQKFKENSKEFTNVRNKKESYERCIAQSFLKDELKLIFKKQREFGFSFSKKFEEEVLSVAFYKRALKDFSHLVGNCSFFTDEKRAPKNSPLAFMFVALTRIINLLNNLKNTEGILYTKDDLNALLNEVLKNGTLTYKQTKKLLGLSDDYEFKGEKGTYFIEFKKYKEFIKALGDHSLSQDDLNEIAKDITLIKDEIKLKKALAKYDLNQNQIDSLSKLEFKDHLNISFKALKLITPLMLEGKKYDEACNELNLKVAINEDKKDFLPAFNETYYKDEVTNPVVLRAIKEYRKVLNALLKKYGKVHKINIELAREVGKNYSQRAKIEKEQNENYKAKKDAELECEKLGLKINSKNILKLRLFKEQKEFCAYSGEKIKISDLQDEKMLEIDHIYPYSRSFDDSYMNKVLVFTKQNQEKLNQTPFEAFGNDSAKWQKIEVLAKNLPTKKQKRILDKNYKDKEQKDFKDRNLNDTRYIARLVLNYTKDYLDFLPLSDDENTKLNDTQKGSKVHVEAKSGMLTSALRHTWGFSAKDRNNHLHHAIDAVIIAYANNSIVKAFSDFKKEQESNSAELYAKKISELDYKNKRKFFEPFSGFRQKVLDKIDEIFVSKPERKKPSGALHEETFRKEEEFYQSYGGKEGVLKALELGKIRKVNGKIVKNGDMFRVDIFKHKKTNKFYAVPIYTMDFALKVLPNKAVARSKKGEIKDWILMDENYEFCFSLYKDSLILIQTKDMQEPEFVYYNAFTSSTVSLIVSKHDNKFETLSKNQKILFKNANEKEVIAKSIGIQNLKVFEKYIVSALGEVTKAEFRQREDFKK

SEQ ID NO: 334 - protein, 965 aa, Campylobacter coli
MKIIGFNLGIANIGWALRENDEIIDCGVRVFDIPENPKNGNSLALERRENKARMKIVKRKKARMLATKTFLKKELNVDLSKLFLIGSTQSIYELRTKALSSLISKEELSAIILHIAKHRGYDDSALKNENGTIIEALNKNKEAMLKFKSVGEYFYKNFVQNKEVKKIRNTTEDYSNSVPRSLLKQELDLILDKQKELGLIKNADFKAKLFEIIFFKRPLKDFSNKIGNCIFFENEKRAAKNTISACEFVALGKVVNLLKSIEKDIGIVYEKDSINEIMSIILDKTSISYKKIRDILNLPQDINFKGLDYSKNNVENSKLVDLKKLNEFKKALGDGFTNLDKDILDSIATDITLTKDTATLKEKLKNYNVLNAEQIEKLSELVFNDHINLSLKALKQIIPLMYEGKRYDEACELCNFTIAKNQEKNEYLPLFEKTRFAKDISSPVVIRAICEFRKLLNDIIRRYGSVHKIHLELTRDFGISFNDRKKIIKEIEQNEQSRIKALETIKELKLEETSKNIQIVRLFEDQKGICPYSGLKMDLKCLDELVIDYIRPYNRSLDDSYSNKVLTFKKLNDLKQGKTPFEAFGEDEKLWAEINERIKEYNGKKRFKIFDKFFKDKKPFDFTEQTLQDTRWLTKLVASYLNEYLSFLPISEDENTALGYGEKGSKQHVILSSGMITQMLRNFWYLGFKNHKDYKNNAMDAIIVAFTTNSIIFTFNNFKKELDLAKAEFYANKISESDYLLKRKFLPPFSGFKEQALEKVKNIFVSHSLKIKNKGTLHELTPLKIKELKNTYGDLDLAVKLGKIRKYNDKYYANAKGSLVRTDLFADKENKFHAVSIYKADFSTKKLPNKTPATTSNGETKEGIEMNENYNFCMSLYKNTPISVKIKGMKEPIICYYHGFNTSGSKITYKKHDNNYHNLSEDEMVVFRKNDKESIVVGKILEIKKYSISPSGELSLIENEERKWF

SEQ ID NO: 335 - protein, 965 aa, Campylobacter coli
MKIIGFNLGIANIGWALRENDEIIDCGVRVFDIPENPKNGNSLALERRENKARMKIVKRKKARMLATKTFLKKELNVDLSKLFLIGSTQSIYELRTKALSSLISKEELSAIILHIAKHRGYDDSALKNENGTIIEALNKNKEAMLKFKSVGEYFYKNFVQNKEVKKIRNTTEDYSNSVPRSLLKQELDLILDKQKELGLIKNADFKAKLFEIIFFKRPLKDFSNKIGNCIFFENEKRAAKNTISACEFVALGKVVNLLKSIEKDIGIVYEKDSINEIMSIILDKTSISYKKIRDILNLPQDINFKGLDYSKNNAENSKLVDLKKLNEFKKALGDGFANLDKDILDSIATDITLTKDTATLKEKLKNYNVLNAEQIEKLSELVFNDHINLSLKALKQIIPLMYEGKRYDEACELCNFTIAKNQEKNEYLPLFEKTRFAKDISSPVVIRAICEFRKLLNDIIRRYGSVHKIHLELTRDFGISFNDRKKIIKEIEQNEQSRIKALETIKELKLEETSKNIQIVRLFEDQKGICPYSGLKMDLKCLDELVIDYIRPYNRSLDDSYSNKVLTFKKLNDLKQGKTPFEAFGEDEKLWAEINERIKEYNGKKRFKIFDKFFKDKKPFDFTEQTLQDTRWLTKLVASYLNEYLSFLPISEDENTALGYGEKGSKQHVVLSSGMITQMLRNFWYLGFKNHKNYKNNAMDAIIVAFTTNSIIFAFNNFKKELDLAKAEFYANKISESDYLLKRKFLPPFSGFKEQALEKVKNIFVSHSLKIKNKGTLHELTPLKIKELKNTYGDLDLAVKLGKIRKYNDKYYANTKGSLVRTDLFVDKENKFHAVSIYKADFSTKKLPNKTPATTSNGETKEGIEMNENYNFCMSLYKNTPVSVKIKGMKEPIICYYHGFNTSGSKITYKKHDNNYHNLSEDEMVVFRKNDKESIVVGKILEIKKYSISPSGELSLIENEKRKWF

SEQ ID NO: 336 - protein, 965 aa, Campylobacter coli
MKIIGFNLGIANIGWALRENDEIIDCGVRVFDIPENPKNGNSLALERRENKARMKIVKRKKARMLATKTFLKKELNVDLSKLFLIGSTQSIYELRTKALSSLISKEELSAIILHIAKHRGYDDSALKNENGTIIEALNKNKEAMLKFKSVGEYFYKNFVQNKEVKKIRNTTEDYSNSVPRSLLKQELDLILDKQKELGLIKNADFKEKLFEIIFFKRPLKDFSNKIGNCIFFENEKRAAKNTISACEFVALGKVVNLLKSIEKDIGIVYEKDSINEIMSIILDKTSISYKKIRDILNLPQDINFKGLDYSKNNAENSKLVDLKKLNEFKKALGDGFANLDKDILDSIATDITLTKDTATLKEKLKNYNVLNAEQIEKLSELVFNDHINLSLKALKQIIPLMYEGKRYDEACELCNFTIAKNQEKNEYLPLFEKTRFAKDISSPVVIRAICEFRKLLNDIIRRYGSVHKIHLELTRDFGISFNDRKKIIKEIEQNEQSRIKALETIKELKLEETSKNIQIVRLFEDQKGICPYSGLKMDLKCLDELVIDYIRPYNRSLDDSYSNKILTFKKLNDLKQGKTPFEAFGEDEKLWAEINERIKEYNGKKRFKIFDKFFKDKKPFDFTEQTLQDTRWLTKLVASYLNEYLLFLPINEDENTALGYGEKGSKQHVVLSSGMITQMLRNFWYLGFKNHKDYKNNAMDAIIVAFTTNSIIFAFNNFKKELDLAKAEFYANKISESDYLLKRKFLPPFSGFKEQALEKVKNIFVSHSLKIKNKGTLHELTPLKIKELKNTYGDLDLAVKLGKIRKYNDKYYANAKGSLVRTDLFADKENKFHAVSIYKADFSTKKLPNKTPATTSNGETKEGIEMNENYNFCMSLYKNTPISVKIKGMKEPIICYYHGFNTSGSKITYKKHDNNYHNLSEDEMVVFRKNDKESIVVGKILEIKKYSISPSGELSLIENEERKWF

SEQ ID NO: 337 - protein, 933 aa, Campylobacter coli
MKIIGFNLGIANIGWALRENDEIIDCGVRVFDIPENPKNGNSLALERRENKARMKIVKRKKARMLATKTFLKKELNVDLSKLFLIGSTQSIYELRTKALSSLISKEELSVIILHIAKHRGYDDSALKNENGTIIEALNKNKETMLKFKSVGEYFYKNFVQNKEVKKIRNTTEDYSNSVPRSLLKQELDLILDRQKELGLIKNADFKAKLFEIIFFKRPLKDFSNKIGNCIFFENEKRAAKNTISACEFVALGKVVNLLKSIEKDIGIVYEKDSINEIMSIILDKTSISYKKIRDILNLPQDINFKGLDYSKNNVENSKLVDLKKLNEFKKALGDGFTNLDKDILDSIATDITLTKDTATLKEKLKNYNVLNAEQIEKLSELVFNDHINLSLKALKQIIPLMYEGKRYDEACELCNFTIAKNQEKNEYLPLFEKTRFAKDISSPVVIRAICEFRKLLNDIIRRYGSVHKIHLELTRDFGISFNDRKKIIKEIEQNEQSRIKALETIKELKLEETSKNIQIVRLFEDQKGICPYSGLKMDLKCLDELVIDYIRPYNRSLDDSYSNKVLTFKKLNDLKQGKTPFEAFGEDEKLWAEINERIKEYNGKKRFKIFDKFFKDKKPFDFTEQTLQDTRWLTKLVASYLNEHLSFLPISEDENTALGYGEKGSKQHVILSSGMITQMLRNFWYLGFKNHKDYKNNAMDAIIVAFTTNSIIFTFNNFKKELDLAKAEFYANKISESDYLLKRKFLPPFSGFKEQALEKVKNIFVSHSLKIKNKGTLHELTPLKIKELKNTYGDLDLAVKLGKIRKYNDKYYANANGSLVRSDLFIDKKNKFHAVPIYKADFSTKKLPNKTPATTSNGETKEGIEMNENYNFCMSLYKNTPISVKIKGMKESIICYYHGFNTSGSKITYKKHDNNYHNLSEDEMVVFRKNDKE

SEQ ID NO: 338 - protein, 666 aa, Campylobacter jejuni
KGEKGTYFIEFKKYKEFIKALDEHSLSQDDLNEIAKDITLIKDEIKLKKALAKYDLKENQIDSLSKLEFKDHLNISFKALKLITPLMLEGKKYDEACNELNLKVAINEDKKDFLPAFNETYYKDEVTNPVVLRAIKEYRKILNALLKKYGKVHKINIELAREVGKNHSQRAKIEKEQNENYKAKKDAELECEKLGLKINSKNILKLRLFKEQKEFCVYSGEKIKLSDLQDEKMLEIDHIYPYSRSFDDSYMNKVLVFAKQNQEKLNKTPFEAFGNDSTKWQKIEVLTKNLPTKKQKRILDKNYKDKEQKDFKDRNLNDTRYIARLVLNYTKDYLDFLPLSDDENTKLNDTQKGSKVHVEAKSGMLTSALRHTWGFSTKDRNNHLHHAIDAAIIAYANNSIVKAFSDFKKEQESNSAELYAKKISELDYKNKRKFFEPFSGFRQKVLDKIDEIFVSKPERKKPSGALHEETFRKEEEFYQSYGGKEGVLKALELGKIRKVNGKIVKNGDMFRVDIFKHKKTNKFYAVPIYTMDFALKVLPNKAVARSKKGEIKDWILMDEDYEFCFSLYKDSLILIQTKDMQEPELVYFNAFTSSTVSLIVSKHDNKFETLSKNQKILFKNANEKEVIAKSIGIQNLKVFEKYIVSALGEVTKAEFRQREDFKNELR

SEQ ID NO: 339 - protein, 190 aa, Campylobacter jejuni
MAFDIGISSIGWAFSENDELKDCGVRIFTKVENPKTGESLALPRRLARSARKRLARRKARLNHLKHLIANEFKLNYEDYQSFDESLAKAYKGSLISPYELRFRALNELLSKQDFARVILHIAKRRGYDDIKNSDDKEKGAILKAIKQNEEKLANYQSVGEYLYKEYFQKFKENSKEFTNVRNKKKVMNAA

SEQ ID NO: 340 - protein, 985 aa, Campylobacter jejuni
MAKILAFDIGISSIGWAFVENDELKDCGVRIFTKAENPKTGESLALPRRLARSARKRLARRKARLNHLKHLIANEFKLNYEDYQSFDESLAKAYKGTLISPYELRFKALNELLSKQDLARVILHIAKRRGYDNIKNSDDKEKGAILKAVKENEEKLANYKSVGEYLYKEYFQKFKENSKEFINVRNKKESYERCIAQSFLKDELKLIFQKQREFGFNFSKKFEEEVLSVAFYKRALKDFSHLVGNCSFFVDEKRAPKNSPLAFEFVALTRIVNLLNNLNKNNSYIKDDLNALLSEVLKNGTLTYKQTKKILGLSDDYEFKGQKGNYFIEFKKYKEFIKALCEHNLNQDDLNEIAKDITLVKDETKLKKALAKYDLNQNQIENLSKIEFKDHLNISFKALKLIVPLMREGKKYDEVCNELNLKTAINEDKKEFLPAFNETYYKDEVNNPVVLRAIKEYRKVLNSLLKKYGKVHKINIELAREVGKNHRERSKIEKEQNENFKAKKDAELECEKLGLKINSKNILKLRLFKEQKEFCVYSGEKIKISDLQDEKMLEIDHIYPYSRSFDDSYMNKVLVFTKQNQEKLNKTPFEAFGKDDVKWQKIETLAKNLPAKKQKRILDKNYKDKEQKDFKDRNLNDTRYIARLVLNYTKDYLEFLPLSDDENIKLNDTQKGSKVHVEAKSGMLTSVLRHTWGFSTKDRNNHLHHAIDAVIIAYANASVVKAFSDFKKEQENYTAELYAKKINELDFKNKRKFFEPFSNFRQKVLEKIDEIFVSKPERKKPSGALHEETFYKEEEFYKEYGGKEGVLKALELGKIRKVNGKIVSNANMFRVDIFKYKKTNKFYAVPIYTMDFALGILPNKAVVGGKDKQGIIKDWLLMDENYEFCFSLYKDSLILLQTKDMQEPELVYFKSFKSSTAGLVVSKHDNKFENLNENQKKLFKSANEKKVVAEGIGIQNLKVFEKYIVSALGEITKAEIKERENFKKK

SEQ ID NO: 341 - protein, 987 aa, Campylobacter jejuni
MARILAFDIGISSIGWAFSENDELKDCGVRIFTKAENPKTGESLALPRCLARSARKRLARRKARLNHLKHLIANEFKLNYEDYQSFDESLAKAYKGSLISPYELRFRALNELLSKQDFARVILHIAKRRGYDDIKNNGDEEKGEILKAIKQNEEKLVSYQSVGEYLYKEYFQKFKENSKEFINVRNKKESYERCIAQSFLKDELKLIFQKQRKFGFSFSKKFEEEVLSVAFYKRALKDFSHLVGNCSFFTDEKRAPKNSPLAFMFVALTRIINLLNNLKNTEGILYTKDDLNTLLNEVLKNGTLTYKQTKKLLGLSNDYEFKGEKGTYFIEFQKYKEFVKALGEHNLSQDDLNEIAKDITLIKDEIKLKKALAKYDLNQNQIDSLSKLEFKDHLNISFKALKLITPLMLEGKKYDEACNELNLKVAINEDKKDFLPAFNETYYKDEVTNPVVLRAIKEYRKVLNALLKKYGKVHKINIELAREVGKNHSQRAKIEKEQNENYKAKKDAELECEKLGLKINSKNILKLRLFKEQKEFCVYSGEKIKISDLQDEKMLEIDHIYPYSRSFDDSYMNKVLVFTKQNQEKLNKTPFETFGNDRVKWQKIEVLAKNLPTKKQKRILDKNYKDKEQKDFKDRNLNDTRYIARLVLNYTKDYLDFLPLSDDENTKLNDTQKGSKVHVEAKSGMLTSTLRHTWGFSTKDRNNHLHHAIDAAIIAYANNSIVKAFSDFKKEQESNTAELYAKKISELDYKNKRKFFEPFSGFRQKLLDKIDEIFVSKPERKKPSGALHEETFRKEEEFYQSYGGKEGVLKALELGKIRKVNGKIVSNGDMFRVDIFKHKKTNKFYAVPIYTMDFALKVLPNKAVVQGKDKKSGLIKDWILMDENYEFCFSLYKDSLILIQTKDMQEPELVYYERLDSSNASLTVSKHDNKFETLSKNQKILFKNANEKEVIAKSIGIQNLKVFEKYIVSALGEVTKAEFRQREDFKK

SEQ ID NO: 342 - protein, 987 aa, Campylobacter jejuni
MARILAFDIGISSIGWAFSENDELKDCGVRIFTKAENPKTGESLALPRRLARSARKRLARRKARLNHLKHLIANEFKLNYEDYQSFDEGLAKAYKGSLISPYELRFRALNELLSKQDFARVILHIAKRRGYDDIKNNGDEEKSEILKAIKQNEEKLVNYQSVGEYLYKEYFQKFKENSKEFINVRNKKESYERCIAQSFLKDELKLIFQKQREFGFSFSKKFEEEVLSVAFYKRALKDFSHLVGNCSFFTDEKRAPKNSPLAFMFVALTRIINLLNNLKNTEGILYTKDDLNTLLNEVLKNGTLTYKQTKKLLGLSDDYEFKGEKGTYFIEFKKYKEFIKALGEHNLSQDNLNEIAKDITLIKDEIKLKKALAKYDLNQNQIDSLSKLEFKDHLNISFKALKLITPLMLEGKKYDEAYNELNLKVAINEDKKDFLPAFNETYYKDEVTNPVVLRAIKEYRKVLNALLKKYGKVHKINIELAREVGKNHSQRAKIEKEQNENYKAKKDAELECEKLGLKINSKNILKLRLFKEQKEFCAYSGEKIKISDLQDEKMLEIDHIYPYSRSFDDSYMNKVLVFTKQNQEKLNQTPFEAFGNDSAKWQKIEVLAKNLPTKKQKRILDKNYKDKEQKDFKDRNLNDTRYIARLVLNYTKDYLDFLPLSDDENTKLNDTQKGSKVHVEAKSGMLTSALRHTWGFSAKDRNNHLHHAIDAVIIAYANNSIVKAFSDFKKEQESNSAELYAKKISELDYKNKRKFFEPFSGFRQKVLDKIDEIFVSKPERKKPSGALHEETFRKEEEFYQSYGGKEGVLKALELGKIRKVNGKIVKNGDMFRVDIFKHKKTNKFYAVPIYTMDFALKVLPNKAVVQGKDKKSGLIKDWILMDENYEFCFSLYKDSLILIQTKDMQEPELVYFNAFTSSTVSLIVSKHDNKFETLSKNQKILFKNANEKEVIAKSIGIQNLKVFEKYIVSALGEVTKAEFRQREDFKK

SEQ ID NO: 343 - protein, 961 aa, Campylobacter jejuni
MARILAFDIGISSIGWAFSENDELKDCGVRIFTKAENPKTGESLALPRRLARSARKRLARRKARLNHLKHLIANEFKLNYEDYQSFDESLAKAYKGSLISPYELRFRALNELLSKQDFARVILHIAKRRGYDDIKNNGDEEKGKILKAIKQNEEKLVNYQSVGEYLYKEYFQKFKENSKEFINVRNKKESYERCITQSFLKYELKLIFQKQREFGFSFSKKFEEEVLSVAFYKRALKDFSHLVGNCSFFSDEKRAPKNSPLAFMFVALTRIINLLNNLKNTEGILYTKDDLNALLNEVLKNGTLTYKQTKKLLGLSDDYEFKGEKGTYFIEFKKYKEFIKALGEHNLSQDDLNEIAKDITLIKDEIKLKKALAKYDLNQNQIDSLSKLEFKDHLNIGFKALKLITPLMLEGKKYDEACNELNLKVAINEDKKDFLPAFNETYYKDEVTNPVVLRAIKEYRKVLNALLKKYGKVHKINIELAREVGKNHSQRAKIEKEQNENYKAKKDAELECEKLGLKINSKNILKLRLFKEQKEFCAYSGEKIKLSDLQDEKMLEIDHIYPYSRSFDDSYMNKVLVFTKQNQEKLNKTPFEAFGNDNVKWQKIEVLAKNLPEKKQKRILDKNYKDKEQKDFKDRNLNDTRYIARLVLNYTKDYLDFLPLSDDENTKLKGSKVHVEAKSGMLTSALRHTWGFSTKDRNNHLHHAIDAAIIAYANNSIVKDFSDFKKEQESNSAELYAKKISELDYKNKRKFFEPFSGFRQKVLDKIDEIFVSKPERKKPSGALHEETFRKEEEFYQSYGGKEGVLKALELGKIRKVNGKIVKNGDMFRVDIFKHKKTNKFYAVPIYTMDFALKVLPNKAVARSKKGEIKDWILMDENYEFCFSLYKDSLILIQTKDMQEPELVYFNAFTSSTVSLIVSKHDNKFETLSKNLKVFEKYIVSALGEVTKAEFRQREDFKNELR

SEQ ID NO: 344 - protein, 984 aa, Campylobacter jejuni
MARILAFDIGISSIGWAFSENDELKDCGVRIFTKAENPKTGESLALPRRLARSARKRLARRKARLNHLKHLIANEFKLNYEDYQSFDESLAKAYKGSLISPYELRFRALNELLSKQDFARVILHIAKRRGYDDIKNNGDEEKGKILKAIKQNEEKLVNYQSVGEYLYKEYFQKFKENSKEFINVRNKKESYERCITQSFLKYELKLIFQKQREFGFSFSKKFEEEVLSVAFYKRALKDFSHLVGNCSFFTDEKRAPKNSPLAFMFVALTRIINILNNLKNTEGILYTKDDLNALLNEVLKNGTLTYKQTKKLLGLSDDYEFKGEKGTYFIEFKKYKEFIKALGEHNLSQDDLNEIAKDITLIKDEIKLKKALAKYDLNQNQIDSLSKLEFKDHLNISFKALKLITPLMLEGKKYDEACNELNLKVAINEDKKDFLPAFNETYYKDEVTNPVVLRAIKEYRKILNALLKKYGKVHKINIELAREVGKNHSQRAKIEKEQNENYKAKKDAEIECEKLGLKINSKNILKLRLFKEQKEFCAYSGEKIKISDLQDEKMLEIDHIYPYSRSFDDSYMNKVLVFTKQNQEKLNQTPFEAFGNDSAKWQKIEVLAKNLPTKKQKRILDKNYKDKEQKDFKDRNLNDTRYIARLVLNYTKDYLDFLPLSDDENTKLNDTQKGSKVHVEAKSGMLTSALRHTWGFSAKDRNNHLHHAIDAVIIAYANNSIVKAFSDFKKEQESNSAELYAKKISELDYKNKRKFFEPFSGFRQKVLDKIDEIFVSKPERKKPSGALHEETFRKEEEFYQSYGGKEGVLKALELGKIRKVNGKIVKNGDMFRVDIFKHKKTNKFYAVPIYTMDFALKVLPNKAVARSKKGEIKDWILMDENYEFCFSLYKDSLILIQTKDMQEPEFVYYNAFTSSTVSLIVSKHDNKFETLSKNQKILFKNANEKEVIAKSIGIQNLKVFEKYIVSALGEVTKAEFRQREDFKK

SEQ ID NO: 345 - protein, 987 aa, Campylobacter jejuni
MARILAFDIGISSIGWAFSENDELKDCGVRIFTKAENPKTGESLALPRRLARSARKRLARRKARLNHLKHLIANEFKLNYEDYQSFDESLAKAYKGSLISPYELRFRALNELLSKQDFARVILHIAKRRGYDDIKNNGDEEKGKILKAIKQNEEKLVSYQSVGEYLYKEYFQKFKENSKEFINVRNKKESYERCIAQSFLKDELKLIFQKQREFGFSFSKKFEEEVLSVAFYKRALKDFSHLVGNCSFLLMKKERQKNSPLAFMFVALTRIINLLNNLKNTEGILYTKDDLNTLLNEALKNGTLTYKQTKKLLGLSNDYEFKGEKGTYFIEFQKYKEFVKALGEHNLSQDDLNEIAKDITLIKDEIKLKKALAKYDLNQNQIDSLSKLEFKDHLNISFKALKLITPLMLEGKKYDEACNELNLKVAINEDKKDFLPAFNETYYKDEVTNPVVLRAIKEYRKVLNALLKKYGKVHKINIELAREVGKNHSQRAKIEKEQNENYKAKKDAELECEKLGLKINSKNILKLRLFKEQKEFCVYSGEKIKISDLQDEKMLEIDHIYPYSRSFDDSYMNKVLVFTKQNQEKLNKTPFETFGNDRVKWQKIEVLAKNLPTKKQKRILDKNYKDKEQKDFKDRNLNDTRYIARLVLNYTKDYLDFLPLSDDENTKLNDTQKGSKVHVEAKSGMLTSTLRHTWGFSTKDRNNHLHHAIDAAIIAYANNSIVKAFSDFKKEQESNTAELYAKKISELDYKNKRKFFEPFSGFRQKLLDKIDEIFVSKPERKKPSGALHEETFRKEEEFYQSYGGKEGVLKALELGKIRKVNGKMVKNGDMFRVDIFKHKKTNKFYAVPIYTMDFALKVLPNKAVVQGKDKKSGLIKDWILMDENYEFCFSLYKDSLILIQTKDMQEPELVYYERLDSSNASLTVSKHDNKFETLSKNQKILFKNANEKEVIAKSIGIQNLKVFEKYIVSALGEVTKAEFRQREDFKK

SEQ ID NO: 346 - protein, 987 aa, Campylobacter jejuni
MARILAFDIGISSIGWAFSENDELKDCGVRIFTKAENPKTGESLALPRRLARSARKRLARRKARLNHLKHLIANEFKLNYEDYQSFDESLAKAYKGSLISPYELRFRALNELLSKQDFARVILHIAKRRGYDDIKNNGDEEKSEILKAIKQNEEKLVNYQSVGEYLYKEYFQKFKENSKEFINVRNKKESYERCIAQSFLKDELKLIFQKQREFGFSFSKKFEEEVLSVAFYKRALKDFSHLVGNCSFFTDEKRAPKNSPLAFMFVALTRIINLLNNLKNTEGILYTKDDLNTLLNEVLKNGTLTYKQTKKLLGLSDDYEFKGEKGTYFIEFKKYKEFIKALGEHNLSQDNLNEIAKDITLIKDEIKLKKALAKYDLNQNQIDSLSKLEFKDHLNISFKALKLITPLMLEGKKYDEAYNELNLKVAINEDKKDFLPAFNETYYKDEVTNPVVLRAIKEYRKVLNALLKKYGKVHKINIELAREVGKNHSQRAKIEKEQNENYKAKKDAELECEKLGLKINSKNILKLRLFKEQKEFCAYSGEKIKISDLQDEKMLEIDHIYPYSRSFDDSYMNKVLVFTKQNQEKLNQTPFEAFGNDSAKWQKIEVLAKNLPTKKQKRILDKNYKDKEQKDFKDRNLNDTRYIARLVLNYTKDYLDFLPLSDDENTKLNDTQKGSKVHVEAKSGMLTSALRHTWGFSAKDRNNHLHHAIDAVIIAYANNSIVKAFSDFKKEQESNSAELYAKKISELDYKNKRKFFEPFSGFRQKVLDKIDEIFVSKPERKKPSGALHEETFRKEEEFYQSYGGKEGVLKALELGKIRKVNGKIVKNGDMFRVDIFKHKKTNKFYPVPIYTMDFALKVLPNKAVVQGKDKKSGLIKDWILMDENYEFCFSLYKDSLILIQTKDMQEPELVYFNAFTSSTVSLIVSKHDNKFETLSKNQKILFKNANEKEVIAKSIGIQNLKVFEKYIVSALGEVTKAEFRQREDFKK

SEQ ID NO: 347 - protein, 987 aa, Campylobacter jejuni
MARILAFDIGISSIGWAFSENDELKDCGVRIFTKAENPKTGESLALPRRLARSARKRLARRKARLNHLKHLIANEFKLNYEDYQSFDESLAKAYKGSLISPYELRFRALNELLSKQDFARVILHIAKRRGYDDIKNNGDEEKSEILKAIKQNEEKLVNYQSVGEYLYKEYFQKFKENSKEFINVRNKKESYERCIAQSFLKDELKLIFQKQREFGFSFSKKFEEEVLSVAFYKRALKDFSHLVGNCSFFTDEKRAPKNSPLAFMFVALTRIINLLNNLKNTEGILYTKDDLNTLLNEVLKNGTLTYKQTKKLLGLSDDYEFKGEKGTYFIEFKKYKEFIKALGEHNLSQDNLNEIAKDITLIKDEIKLKKALAKYDLNQNQIDSLSKLEFKDHLNISFKALKLITPLMLEGKKYDEAYNELNLKVAINEDKKDFLPAFNETYYKDEVTNPVVLRAIKEYRKVLNALLKKYGKVHKINIELAREVGKNHSQRAKIEKEQNENYKAKKDAELECEKLGLKINSKNILKLRLFKEQKEFCAYSGEKIKISDLQDEKMLEIDHIYPYSRSFDDSYMNKVLVFTKQNQEKLNQTPFEAFGNDSAKWQKIEVLAKNLPTKKQKRILDKNYKDKEQKDFKDRNLNDTRYIARLVLNYTKDYLDFLPLSDDENTKLNDTQKGSKVHVEAKSGMLTSALRHTWGFSAKDRNNHLHHAIDAVIIAYANNSIVKAFSDFKKEQESNSAELYAKKISELDYKNKRKFFEPFSGFRQKVLDKIDEIFVSKPERKKPSGALHEETFRKEEEFHQSYGGKEGVLKALELGKIRKVNGKIVKNGDMFRVDIFKHKKTNKFYAVPIYTMDFALKVLPNKAVVQGKDKKSGLIKDWILMDENYEFCFSLYKDSLILIQTKDMQEPELVYFNAFTSSTVSLIVSKHDNKFETLSKNQKILFKNANEKEVIAKSIGIQNLKVFEKYIVSALGEVTKAEFRQREDFKK

SEQ ID NO: 348 - protein, 987 aa, Campylobacter jejuni
MARILAFDIGISSIGWAFSENDELKDCGVRIFTKAENPKTGESLALPRRLARSARKRLARRKARLNHLKHLIANEFKLNYEDYQSFDESLAKAYKGSLISPYELRFRALNELLSKQDFARVILHIAKRRGYDDIKNNGDEEKSEILKAIKQNEEKLVNYQSVGEYLYKEYFQKFKENSKEFINVRNKKESYERCIAQSFLKDELKLIFQKQREFGFSFSKKFEEEVLSVAFYKRALKDFSHLVGNCSFFTDEKRAPKNSPLAFMFVALTRIINLLNNLKNTEGILYTKDDLNTLLNEVLKNGTLTYKQTKKLLGLSDDYEFKGEKGTYFIEFKKYKEFIKALGEHNLSQDNLNEIAKDITLIKDEIKLKKALAKYDLNQNQIDSLSKLEFKDHLNISFKALKLITPLMLEGKKYDEAYNELNLKVAINEDKKDFLPAFNETYYKDEVTNPVVLRAIKEYRKVLNALLKKYGKVHKINIELAREVGKNHSQRAKIEKEQNENYKAKKDAELECEKLGLKINSKNILKLRLFKEQKEFCAYSGEKIKISDLQDEKMLEIDHIYPYSRSFDDSYMNKVLVFTKQNQEKLNQTPFEAFGNDSAKWQKIEVLAKNLPTKKQKRILDKNYKDKEQKDFKDRNLNDTRYIARLVLNYTKDYLDFLPLSDDENTKLNDTQKGSKVHVEAKSGMLTSALRHTWGFSAKDRNNHLHHAIDAVIIAYANNSIVKAFSDFKKEQESNSAELYAKKISELDYKNKRKFFEPFSGFRQKVLDKIDEIFVSKPERKKPSGALHEETFRKEEEFYQSYGGKEGVLKALELGKIRKVNGKIVKNGDMFRVDIFKHKKTNKFYAVPIYTMDFALKVLPNKAVVQGKDKKSGLIKDWILMDENYEFCFSLYKDSLILIQTKDMQEPELVYFNAFTSSTVSLIVSKHDNKFETLSKNQKILFKNANEKEVIAKSIGIQNLKVFEKYIVSALGEVTKAEFRQREDFKK

SEQ ID NO: 349 - protein, 861 aa, Campylobacter jejuni
MARILAFDIGISSIGWAFSENDELKDCGVRIFTKAENPKTGESLALPRRLARSARKRLARRKARLNHLKHLIANEFKLNYEDYQSFDESLAKAYKGSLISPYELRFRALNELLSKQDFARVILHIAKRRGYDDIKNNGDEEKSEILKAIKQNEEKLVNYQSVGEYLYKEYFQKFKENSKEFINVRNKKESYERCITQSFLKDELKLIFQKQREFGFSFSKKFEEEVLSVAFYKRALKDFSHLVGNCSFFTDEKRAPKNSPLAFMFVALTRIINILNNLKNTEGILYTKDDLNALLNEVLKNGTLTYKQTKKLLGLSDDYEFKGEKGTYFIEFKKYKEFIKALGEHNLSQDDLNEIAKDITLIKDEIKLKKALAKYDLNQNQIDSLSKLEFKDHLNISFKALKLITPLMLEGKKYDEACNELNLKVAINEDKKDFLPAFNETYYKDEVTNPVVLRAIKEYRKILNALLKKYGKVHKINIELAREVGKNHSQRAKIEKEQNENYKAKKDAEIECEKLGLKINSKNILKLRLFKEQKEFCAYSGEKIKLSDLQDEKMLEIDHIYPYSRSFDDSYMNKVLVFTKQNQEKLNKTPFEAFGNDSTKWQKIEVLAKNLPEKKQKRILDKNYKDKEQKDFKDRNLNDTRYIARLVLNYTKDYLDFLPLSDDENTKLNDTQKGSKVHVEAKSGMLTSALRHTWGFSAKDRNNHLHHAIDAAIIAYANNSIVKAFSDFKKEQESNSVELYAKKISELDYKNKRKFFEPFSGFRQKVLDKIDEIFVSKPERKKPSGALHEETFRKEEEFYQSYGGKEGVLKALELGKIRKVNGKIVKNGDMFRVDIFKHKKTNKFLCCANLYYGFCFKSITK

SEQ ID NO: 350 - protein, 462 aa, Campylobacter jejuni
MARILAFDIGISSIGWAFSENDELKDCGVRIFTKAENPKTGESLALPRRLARSARKRLARRKARLNHLKHLIANEFKLNYEDYQSFDESLAKAYKGSLISPYELRFRALNELLSKQDFARVILHIAKRRGYDDIKNNGDEEKSEILKAIKQNEEKLVNYQSVGEYLYKEYFQKFKENSKEFINVRNKKESYERCITQSFLKDELKLIFQKQREFGFSFSKKFEEEVLSVAFYKRALKDFSHLVGNCSFFTDEKRAPKNSPLAFMFVALTRIINILNNLKNTEGILYTKDDLNALLNEVLKNGTLTYKQTKKLLGLSDDYEFKGEKGTYFIEFKKYKEFIKALGEHNLSQDDLNEIAKDITLIKDEIKLKKALAKYDLNQNQIDSLSKLEFKDHLNISFKALKLITPLMLEGKKYDEACNELNLKVAINEDKKDFLPAFNETYYKDEVTNPVVLRAIKEYRKS

SEQ ID NO: 351 - protein, 984 aa, Campylobacter jejuni
MARILAFDIGISSIGWAFSENDELKDCGVRIFTKAENPKTGESLALPRRLARSARKRLARRKARLNHLKHLIANEFKLNYEDYQSFDESLAKAYKGSLISPYELRFRALNELLSKQDFARVILHIAKRRGYDDIKNNGDEEKSEILKAIKQNEEKLVNYQSVGEYLYKEYFQKFKENSKEFINVRNKKESYERCITQSFLKDELKLIFQKQREFGFSFSKKFEEEVLSVAFYKRALKDFSHLVGNCSFFTDEKRAPKNSPLAFMFVALTRIINLLNNLKNTEGILYTKDDLNALLNEVLKNGTLTYKQTKKLLGLSDDYEFKGEKGTYFIEFKKYKEFIKALDEHSLSQDDLNEIAKDITLIKDEIKLKKALAKYDLNQNQIDSLSKLEFKDHLNISFKALKLITPLMLEGKKYDEACNELNLKVAINEDKKDFLPAFNETYYKDEVTNPVVLRAIKEYRKILNALLKKYGKVHKINIELAREVGKNHSQRAKIEKEQNENYKAKKDAEIECEKLGLKINSKNILKLRLFKEQKEFCAYSGEKIKISDLQDEKMLEIDHIYPYSRSFDDSYMNKVLVFTKQNQEKLNKTPFEAFGNDGVKWQKIEVLAKNLPEKKQKRILDKNYKDKEQKDFKDRNLNDTRYIARLVLNYTKDYLDFLPLSDDENTKLNDTQKGSKVHVEAKSGMLTSALRHTWGFSTKDRNNHLHHAIDAAIIAYANNSIVKAFSDFKKEQESNSAELYAKKISELDYKNKRKFFEPFSGFRQKVLDKIDEIFVSKPERKKPSGALHEETFRKEEEFYQSYGGKEGVLKALELGKIRKVNGKIVKNGDMFRVDIFKHKKTNKFYAVPIYTMDFALKVLPNKAVARSKKGEIKDWILMDENYEFCFSLYKDSLILIQTKDMQEPELVYFNAFTSSTVSLVVSKHDNKFETLSKNQKILFKNANEKEVIAKSIGIQNLKVFEKYIVSALGEVTKAEFRQREDFKK

SEQ ID NO: 352 - protein, 984 aa, Campylobacter jejuni
MARILAFDIGISSIGWAFSENDELKDCGVRIFTKAENPKTGESLALPRRLARSARKRLARRKARLNHLKHLIANEFKLNYEDYQSFDESLAKAYKGSLISPYELRFRALNELLSKQDFARVILHIAKRRGYDDIKNSDDKEKGAILKAIKQNEEKLANYQSVGEYLYKEYFQKFKENSKEFTNVRNKKESYERCIAQSFLKDELKLIFKKQREFGFSFSKKFEEEVLSVAFYKRALKDFSHLVGNCSFFTDEKRAPKNSPLAFMFVALTRIINLLNNLKNTEGILYTKDDLNALLNEVLKNGTLTYKQTKKLLGLSDDYEFKGEKGTYFIEFKKYKEFIKALGDHSLSQDDLNEIAKDITLIKDEIKLKKALAKYDLNQNQIDSLSKLEFKDHLNISFKALKLITPLMLEGKKYDEACNELNLKVAINEDKKDFLPAFNETYYKDEVTNPVVLRAIKEYRKVLNALLKKYGKVHKINIELAREVGKNYSQRAKIEKEQNENYKAKKDAELECEKLGLKINSKNILKLRLFKEQKEFCAYSGEKIKISDLQDEKMLEIDHIYPYSRSFDDSYMNKVLVFTKQNQEKLNQTPFEAFGNDSAKWQKIEVLAKNLPTKKQKRILDKNYKDKEQKDFKDRNLNDTRYIARLVLNYTKDYLDFLPLSDDENTKLNDTQKGSKVHVEAKSGMLTSALRHTWGFSAKDRNNHLHHAIDAVIIAYANNSIVKAFSDFKKEQESNSAELYAKKISELDYKNKRKFFEPFSGFRQKVLDKIDEIFVSKPERKKPSGALHEETFRKEEEFYQSYGGKEGVLKALELGKIRKVNGKIVKNGDMFRVDIFKHKKTNKFYAVPIYTMDFALKVLPNKAVARSKKGEIKDWILMDENYEFCFSLYKDSLILIQTKDMQEPEFVYYNAFTSSTVSLIVSKHDNKFETLSKNQKILFKNANEKEVIAKSIGIQNLKVFEKYIVSALGEVTKAEFRQREDFKK

SEQ ID NO: 353 - protein, 984 aa, Campylobacter jejuni
MARILAFDIGISSIGWAFSENDELKDCGVRIFTKAENPKTGESLALPRRLARSARKRLARRKARLNHLKHLIANEFKLNYEDYQSFDESLAKAYKGSLISPYELRFRALNELLSKQDFARVILHIAKRRGYDDIKNSDDKEKGAILKAIKQNEEKLANYQSVGEYLYKEYFQKFKENSKEFTNVRNKKESYERCIAQSFLKDELKLIFKKQREFGFSFSKKFEEEVLSVAFYKRALKDFSHLVGNCSFFTDEKRAPKNSPLAFMFVALTRIINLLNNLKNTEGILYTKDDLNTLLNEVLKNGTLTYKQTKKLLGLSDDYEFKGEKGTYFIEFKKYKEFIKALGEHNLSQDDLNEIAKDITLIKDEIKLKKALAKYDLNQNQIDSLSKLEFKDHLNISFKALKLITPLMLEGKKYDEACNELNLKVAINEDKKDFLPAFNETYYKDEVTNPVVLRAIKEYRKVLNALLKKYGKVHKINIELAREVGKNYSQRAKIEKEQNENYKAKKDAELECEKLGLKINSKNILKLRLFKEQKEFCAYSGEKIKISDLQDEKMLEIDHIYPYSRSFDDSYMNKVLVFTKQNQEKLNKTPFEAFGNDSTKWQKIEVLAKNLPEKKQKRILDKNYKDKEQKDFKDRNLNDTRYIARLVLNYTKDYLDFLPLSDDENTKLNDTQKGLKVHVEAKSGMLTSALRHTWGFSAKDRNNHLHHAIDAVIIAYANNSIVKAFSDFKKEQESNSAELYAKKISELDYKNKRKFFEPFSGFRQKVLDKIDEIFVSKPERKKPSGALHEETFRKEEEFYQSYGGKEGVLKALELGKIRKVNGKIVKNGDMFRVDIFKHKKTNKFYAVPIYTMDFALKVLPNKAVARSKKGEIKDWILMDENYEFCFSLYKDSLILIQTKDMQEPEFVYYNAFTSSTVSLIVSKHDNKFETLSKNQKILFKNANEKEVIAKSIGIQNLKVFEKYIVSALGEVTKAEFRQREDFKK

SEQ ID NO: 354 - protein, 984 aa, Campylobacter jejuni
MARILAFDIGISSIGWAFSENDELKDCGVRIFTKAENPKTGESLALPRRLARSARKRLARRKARLNHLKHLIANEFKLNYEDYQSFDESLAKAYKGSLISPYELRFRALNELLSKQDFARVILHIAKRRGYDDIKNSDDKEKGAILKAIKQNEEKLANYQSVGEYLYKEYFQKFKENSKEFTNVRNKKESYERCIAQSFLKDELKLIFKKQREFGFSFSKKFEEEVLSVAFYKRALKDFSHLVGNCSFFTDEKRAPKNSPLAFMFVALTRIINLLNNLKNTEGILYTKDDLNALLNEVLKNGTLTYKQTKKLLGLSDDYEFKGEKGTYFIEFKKYKEFIKALGDHSLSQDDLNEIAKDITLIKDEIKLKKALAKYDLNQNQIDSLSKLEFKDHLNISFKALKLITPLMLEGKKYDEACNELNLKVAINEDKKDFLPAFNETYYKDEVTNPVVLRAIKEYRKVLNALLKKYGKVHKINIELAREVGKNYSQRAKIEKEQNENYKAKKDAELECEKLGLKINSKNILKLRLFKEQKEFCAYSGEKIKISDLQDEKMLEIDHIYPYSRSFDDSYMNKVLVFTKQNQEKLNQTPFEAFGNDSAKWQKIEVLAKNLPTKKQKRILDKNYKDKEQKNFKDRNLNDTRYIARLVLNYTKDYLDFLPLSDDENTKLNDTQKGSKVHVEAKSGMLTSALRHTWGFSAKDRNNHLHHTIDAVIIAYANNSIVKAFSDFKKEQESNSAELYAKKISELDYKNKRKFFEPFSGFRQKVLDKIDEIFVSKPERKKPSGALHEETFRKEEEFYQSYGGKEGVLKALELGKIRKVNGKIVKNGDMFRVDIFKHKKTNKFYAVPIYTMDFALKVLPNKAVARSKKGEIKDWILMDENYEFCFSLYKDSLILIQTKDMQEPEFVYYNAFTSSTVSLIVSKHDNKFETLSKNQKILFKNANEKEVIAKSIGIQNLKVFEKYIVSALGEVTKAEFRQREDFKK

SEQ ID NO: 355 - protein, 984 aa, Campylobacter jejuni
MARILAFDIGISSIGWAFSENDELKDCGVRIFTKAENPKTGESLALPRRLARSARKRLARRKARLNHLKHLIANEFKLNYEDYQSFDESLAKAYKGSLISPYELRFRALNELLSKQDFARVILHIAKRRGYDDIKNSDDKEKGAILKAIKQNEEKLANYQSVGEYLYKEYFQKFKENSKEFTNVRNKKESYERCIAQSFLKDELKLIFKKQREFGFSFSKKFEEEVLSVAFYKRALKDFSHLVGNCSFFTDEKRAPKNSPLAFMFVALTRIINLLNNLKNTEGILYTKDDLNTFLNEVLKNGTLTYKQTKKLLGLSDDYEFKGEKGTYFIEFKKYKEFIKALGDHNLSQDDLNEIAKDITLIKDEIKLKKALAKYDLNQNQIDSLSKLEFKDHLNISFKALKLITPLMLEGKKYDEACNELNLKVAINEDKKDFLPAFNETYYKDEVTNPVVLRAIKEYRKVLNALLKKYGKVHKINIELAREVGKNHSQRAKIEKEQNENYKAKKDAELECEKLGLKINSKNILKLRLFKEQKEFCAYSGEKIKISDLQDEKMLEIDHIYPYSRSFDDSYMNKVLVFTKQNQEKLNKTPFEAFGNDSAKWQKIEVLAKNLPTKKQKRILDKNYKDKEQKDFKDRNLNDTRYIARLVLNYTKDYLDFLPLSDDENTKLNDTQKGSKVHVEAKSGMLTSALRHTWGFSTKDRNNHLHHAIDAVIIAYANNSIVKAFSDFKKEQESNSAELYAKKISELDYKNKRKFFEPFSGFRQKVLDKIDEIFVSKPERKKPSGALHEETFRKEEEFYQSYGGKEGVLKALELGKIRKVNGKIVKNGDMFRVDIFKHKKTNKFYAVPIYTMDFALKVLPNKAVARSKKGEIKDWILMDENYEFCFSLYKDSLILIQTKDMQEPEFVYYNAFTSSTVSLIVSKHDNKFETLSKNQKILFKNANEKEVIAKSIGIQNLKVFEKYIVSALGEVTKAEFRQREDFKK

SEQ ID NO: 356 - protein, 987 aa, Campylobacter jejuni
MARILAFDIGISSIGWAFSENDELKDCGVRIFTKAENPKTGESLALPRRLARSARKRLARRKARLNHLKHLIANEFKLNYEDYQSFDESLAKAYKGSLISPYELRFRALNELLSKQDFARVILHIAKRRGYDDIKNSDDKEKGAILKAIKQNEEKLANYQSVGEYLYKEYFQKFKENSKEFTNVRNKKESYERCIAQSFLKDELKLIFKKQREFGFSFSKKFEEEVLSVAFYKRALKDFSHLVGNCSFFTDEKRAPKNSPLAFMFVALTRIINLLNNLKNTEGILYTKDDLNTLLNEVLKNGTLTYKQTKKLLGLSDDYEFKGEKGTYFIEFKKYKEFIKSLGDHSLSQDDLNEIAKDITLIKDEIKLKKALAKYDLNQNQIDSLSKLEFKDHLNISFKALKLITPLMLEGKKYDEACNELNLKVAINEDKKDFLPAFNETYYKDEVTNPVVLRAIKEYRKVLNALLKKYGKVHKINIELAREVGKNHSQRAKIEKEQNENYKAKKDAELECEKLGLKINSKNILKLRLFKEQKEFCAYSGEKIKISDLQDEKMLEIDHIYPYSRSFDDSYMNKVLVFTKQNQEKLNQTPFEAFGNDSAKWQKIEVLAKNLPTKKQKRILDKNYKDKEQKNFKDRNLNDTRYIARLVLNYTKDYLDFLPLSDDENTKLNDTQKGSKVHVEAKSGMLTSALRHTWGFSAKDRNNHLHHAIDAVIIAYANNSIVKAFSDFKKEQESNSAELYAKKISELDYKNKRKFFEPFSGFRQKVLDKIDEIFVSKPERKKPSGALHEETFRKEEEFYQSYGGKEGVLKALELGKIRKVNGKIVKNGDMFRVDIFKHKKTNKFYAVPIYTMDFALKVLPNKAVARSKKGEIKDWILMDENYEFCFSLYKDSLILIQTKDMQEPEFVYYNAFTSSTVSLIVSKHDNKFETLSKNQKILFKNANEKEVIAKSIGIQNLKVFEKYIVSALGEVTKAEFRQREDFKNELR

SEQ ID NO: 357 - protein, 987 aa, Campylobacter jejuni
MARILAFDIGISSIGWAFSENDELKDCGVRIFTKAENPKTGESLALPRRLARSARKRLARRKARLNHLKHLIANEFKLNYEDYQSFDESLAKAYKGSLISPYELRFRALNELLSKQDFARVILHIAKRRGYDDIKNSDDKEKGAILKAIKQNEEKLANYQSVGEYLYKEYFQKFKENSKEFTNVRNKKESYERCIAQSFLKDELKLIFKKQREFGFSFSKKFEEEVLSVAFYKRALKDFSHLVGNCSFFTDEKRAPKNSPLAFMFVALTRIINLLNNLKNTEGILYTKDDLNALLNEVLKNGTLTYKQTKKLLGLSDDYEFKGEKGTYFIEFKKYKEFIKALGDHSLSQDDLNEIAKDITLIKDEIKLKKALVKYDLNQNQIDSLSKLEFKDHLNISFKALKLITPLMLEGKKYDEACNELNLKVAINEDKKDFLPAFNETYYKDEVTNPVVLRAIKEYRKVLNALLKKYGKVHKINIELAREVGKNYSQRAKIEKEQNENYKAKKDAELECEKLGLKINSKNILKLRLFKEQKEFCAYSGEKIKISDLQDEKMLEIDHIYPYSRSFDDSYMNKVLVFTKQNQEKLNQTPFEAFGNDSAKWQKIEVLAKNLPTKKQKRILDKNYKDKEQKDFKDRNLNDTRYIARLVLNYTKDYLDFLPLSDDENTKLNDTQKGSKVHVEAKSGMLTSALRHTWGFSAKDRNNHLHHAIDAVIIAYANNSIVKAFSDFKKEQESNSAELYAKKISELDYKNKRKFFEPFSGFRQKVLDKIDEIFVSKPERKKPSGALHEETFRKEEEFYQSYGGKEGVLKALELGKIRKVNGKIVKNGDMFRVDIFKHKKTNKFYAVPIYTMDFALKVLPNKAVARSKKGEIKDWILMDENYEFCFSLYKDSLILIQTKDMQEPELVYFNAFTSSTVSLIVSKHDNKFETLSKNQKILFKNANEKEVIAKSIGIQNLKVFEKYIVSALGEVTKAEFRQREDFKNELR

SEQ ID NO: 358 - protein, 983 aa, Campylobacter jejuni; identical to SEQ ID NO: 236

SEQ ID NO: 359 - protein, 987 aa, Campylobacter jejuni
MARILAFDIGISSIGWAFSENDELKDCGVRIFTKAENPKTGESLALPRRLARSARKRLARRKARLNHLKHLIANEFKLNYEDYQSFDESLAKAYKGSLISPYELRFRALNELLSKQDFARVILHIAKRRGYDDIKNSDDKEKGAILKAIKQNEEKLVNYQSVGEYLYKEYFQKFKENSKEFTNVRNKKESYERCIAQSFLKDELKLIFKKQREFGFSFSKKFEEEVLSVAFYKRALKDFSHLVGNCSFFTDEKRAPKNSPLAFMFVALTRIINLLNNLKNTEGILYTKDDLNALLNEVLKNGTLTYKQTKKLLGLSDDYEFKGEKGTYFIEFKKYKEFIKALGDHSLSQDDLNEIAKDITLIKDEIKLKKALAKYDLNQNQIDSLSKLEFKDHLNISFKALKLITPLMLEGKKYDEACNELNLKVAINEDKKDFLPAFNETYYKDEVTNPVVLRAIKEYRKVLNALLKKYGKVHKINIELAREVGKNYSQRAKIEKEQNENYKAKKDAELECEKLGLKINSKNILKLRLFKEQKEFCAYSGEKIKISDLQDEKMLEIDHIYPYSRSFDDSYMNKVLVFTKQNQEKLNQTPFEAFGNDSAKWQKIEVLAKNLPTKKQKRILDKNYKDKEQKDFKDRNLNDTRYIARLVLNYTKDYLDFLPLSDDENTKLNDTQKGSKVHVEAKSGMLTSALRHTWGFSAKDRNNHLHHAIDAVIIAYANNSIVKAFSDFKKEQESNSAELYAKKISELDYKNKRKFFEPFSGFRQKVLDKIDEIFVSKPERKKPSGALHEETFRKEEEFYQSYGGKEGVLKALELGKIRKVNGKIVKNGDMFRVDIFKHKKTNKFYAVPIYTMDFALKVLPNKAVARSEKGEIKDWILMDENYEFCFSLYKDSLILIQTKDMQEPELVYFNAFTSSTVSLIVSKHDNKFETLSKNQKILFKNANEKEVIAKSIGIQNLKVFEKYIVSALGEVTKAEFRQREDFKNELR

SEQ ID NO: 360 - protein, 987 aa, Campylobacter jejuni
MARILAFDIGISSIGWAFSENDELKDCGVRIFTKAENPKTGESLALPRRLARSARKRLARRKARLNHLKHLIANEFKLNYEDYQSFDESLAKAYKGSLISPYELRFRALNELLSKQDFARVILHIAKRRGYDNIKNSDNEEKSEILKAIKQNEEKLVNYQSVGEYLYKEYFQKFKENSKEFINVRNKKESYERCIAQSFLKDELKLIFQKQREFGLSFSKKFEEEVLSVAFYKRALKDFSHLVGNCSFFTDEKRAPKNSPLAFMFVALTRIINLLNNLKNTEGILYTKDDLNTLLNEVLKNGTLTYKQTKKLLGLSDDYEFKGEKGTYFIEFKKYKEFIKALGDHSLSQDDLNEIAKDITLIKDEIKLKKALAKYDLNQNQIDSLSKLEFKDHLNISFKALKLITPLMLEGKKYDEACNELNLKVVINEDKKDFLPAFNETYYKDEVTNPVVLRAIKEYRKVLNALLKKYGKVHKINIELAREVGKNHSQRAKIEKEQNENYKAKKDAELECEKLGLKINNKNILKLRLFKEQKEFCAYSGEKIKLSDLQDEKMLEIDHIYPYSRSFDDSYMNKVLVFTKQNQEKLNKTPFEAFGNDSTKWQKIEVLAKNLPTKKQKRILDKNYKDKEQKDFKDRNLNDTRYIARLVLNYTKDYLDFLPLSDDENTKLNDIQKGSKVHVEAKSGMLTSALRHTWGFSTKDRNNHLHHAIDAVIIAYANNSIVKAFSDFKKEQESNSAELYAKKISELDYKNKRKFFEPFSGFRQKVLDKIDEIFVSKPERKKPSGALHEETFRKEEEFYQSYGGKEGVLKALELGKIRKVNGKIVKNGDMFRVDIFKHKKTNKFYAVPIYTMDFALKVLPNKAVVQGKDKKSGLIKDWILMDENYEFCFSLYKDSLILIQTKDMQEPEFVYYNAFTSSTVSLIVSKHDNKFETLSKNQKILFKNANEKEVIAKSIGIQNLKVFEKYIVSALGEVTKAEFRQREDFKK

SEQ ID NO: 361 - protein, 984 aa, Campylobacter jejuni
MARILAFDIGISSIGWAFSENDELKDCGVRIFTKAENPKTGESLALPRRLARSARKRLARRKARLNHLKHLIANEFKLNYEDYQSFDESLAKAYKGSLISPYELRFRALNELLSKQDFARVILHIVKRRGYDDIKNSDDKEKGAILKAIKQNEEKLANYQSVGEYLYKEYFQKFKENSKEFTNVRNKKESYERCIAQSFLKDELKLIFKKQREFGFSFSKKFEEEVLSVAFYKRALKDFSHLVGNCSFFTDEKRAPKNSPLAFMFVALTRIINLLNNLKNTEGILYTKDDLNTLLNEVLKNGTLTYKQTKKLLGLSDDYEFKGEKGTYFIEFKKYKEFIKALGDHSLSQDDLNEIAKDITLIKDEIKLKKALAKYDLNQNQIDSLSKLEFKDHLNISFKALKLITPLMLEGKKYDEACNELNLKVAINEDKKDFLPAFNETYYKDEVTNPVVLRAIKEYRKVLNALLKKYGKVHKINIELAREVGKNHSQRAKIEKEQNENYKAKKDAEFECEKLGLKINSKNILKLRLFKEQKEFCAYSGEKIKISDLQDEKMLEIDHIYPYSRSFDDSYMNKVLVFTKQNQEKLNKTPFEAFGNDSAKWQKIEVLAKNLPTKKQKRILDKNYKDKEQKDFKDRNLNDTRYIARLVLNYTKDYLDFLPLSDDENTKLNDTQKGSKVHVEAKSGMLTSALRHTWGFSTKDRNNHLHHAIDAVIIAYANNSIVKAFSDFKKEQESNSAELYAKKISELDYKNKRKFFEPFSGFRQKVLDKIDEIFVSKPERKKPSGALHEETFRKEEEFYQSYGGKEGVLKALELGKIRKVNGKIVKNGDMFRVDIFKHKKTNKFYAVPIYTMDFALKVLPNKAVARSKKGEIKDWILMDENYEFCFSLYKDSLILIQTKDMQEPEFVYYNAFTSSTVSLIVSKHDNKFETLSKNQKILFKNANEKEVIAKSIGIQNLKVFEKYIVSALGEVTKAEFRQREDFKK

SEQ ID NO: 362 - protein, 984 aa, Campylobacter jejuni
MARILAFDIGISSIGWAFSENDELKDCGVRIFTKAENPKTGESLALPRRLARSARKRLARRKARLNHLKHLIANEFKLNYEDYQSFDESLAKAYKGSLISPYELRFRALNELLSKQDFARVILHIVKRRGYDDIKNSDDKEKGTILKAIKQNEEKLANYQSVGEYLYKEYFQKFKENSKEFTNVRNKKESYERCIAQSFLKDELKLIFKKQREFGFSFSKKFEEEVLSVAFYKRALKDFSHLVGNCSFFTDEKRAPKNSPLAFMFVALTRIINLLNNLKNTEGILYTKDDLNTLLNEVLKNGTLTYKQTKKLLGLSDDYEFKGEKGTYFIEFKKYKEFIKALGEHNLSQDDLNEIAKDITLIKDEIKLKKALAKYDLNQNQIDSLSKLEFKDHLNISFKALKLITPLMLEGKKYDEACNELNLKVAINEDKKDFLPAFNETYYKDEVTNPVVLRAIKEYRKVLNALLKKYGKVHKINIELAREVGKNYSQRAKIEKEQNENYKAKKDAELECEKLGLKINSKNILKLRLFKEQKEFCAYSGEKIKISDLQDEKMLEIDHIYPYSRSFDDSYMNKVLVFTKQNQEKLNQTPFEAFGNDSAKWQKIEVLAKNLPTKKQKRILDKNYKDKEQKDFKDRNLNDTRYIARLVLNYTKDYLDFLPLSDDENTKLNDTQKGSKVHVEAKSGMLTSALRHTWGFSAKDRNNHLHHAIDAVIIAYANNSIVKAFSDFKKEQESNSAELYAKKISELDYKNKRKFFEPFSGFRQKVLDKIDEIFVSKPERKKPSGALHEETFRKEEEFYQSYGGKEGVLKALELGKIRKVNGKIVKNGDMFRVDIFKHKKTNKFYAVPIYTMDFALKVLPNKAVARSKKGEIKDWILMDENYEFCFSLYKDSLILIQTKDMQEPEFVYYNAFTSSTVSLIVSKHDNKFETLSKNQKILFKNANEKEVIAKSIGIQNLKVFEKYIVSALGEVTKAEFRQREDFKK

SEQ ID NO: 363 - protein, 987 aa, Campylobacter jejuni
MARILAFDIGISSIGWAFSENDELKDCGVRIFTKAENPKTGESLALPRRLARSARKRLARRKARLNHLKHLIANEFKLNYEDYQSFNESLAKAYKGSLISPYELRFRALNELLSKQDFARVILHIAKRRGYDDIKNSDDKEKGAILKVIKQNEEKLANYQSVGEYLYKEYFQKFKENSKEFTNVRNKKESYERCIAQSFLKDELKLIFQKQREFGFSFSKKFEEEVLSVAFYKRALKDFSHLVGNCSFFTDEKRAPKNSPLAFMFVALTRIINLLNNLKNTEGILYTKDDLNALLNEVLKNGTLTYKQTKKLLGLSDDYEFKGEKGTYFIEFKKYKEFIKALGDHSLSQDDLNEIAKDITLIKDEIKLKKALAKYDLNQNQIDSLSKLEFKDHLNISFKALKLITPLMLEGKKYDEACNELNLKVAINEDKKDFLPAFNETYYKDEVTNPVVLRAIKEYRKVLNALLKKYGKVHKINIELAREVGKNYSQRAKIEKEQNENYKAKKDAELECEKLGLKINSKNILKLRLFKEQKEFCAYSGEKIKISDLQDEKMLEIDHIYPYSRSFDDSYMNKVLVFTKQNQEKLNQTPFEAFGNDSAKWQKIEVLAKNLPTKKQKRILDKNYKDKEQKDFKDRNLNDTRYIARLVLNYTKDYLDFLPLSDDENTKLNDTQKGSKVHVEAKSGMLTSALRHTWGFSAKDRNNHLHHAIDAVIIAYANNSIVKAFSDFKKEQESNSAELYAKKISELDYKNKRKFFEPFSGFRQKVLDKIDEIFVSKPERKKPSGALHEETFRKEEEFYQSYGGKEGVLKALELGKIRKVNGKIVKNGDMFRVDIFKHKKTNKFYAVPIYTMDFALKVLPNKAVARSKKGEIKDWILMDENYEFCFSLYKDSLILIQTKDMQEPELVYFNAFTSSTVSLIVSKHDNKFETLSKNQKILFKNANEKEVIAKSIGIQNLKVFEKYIVSALGEVTKAEFRQREDFKNELR

SEQ ID NO: 364 - protein, 984 aa, Campylobacter jejuni
MARILAFDIGISSIGWAFSENDELKDCGVRIFTKAENPKTGESLALPRRLARSARKRLARRKARLNRLKHLIANEFKLNYEDYQSFDESLAKAYKGSLISPYELRFRALNELLSKQDFARVILHIAKRRGYDDIKNSDDKEKGAILKAIKQNEEKLANYQSVGEYLYKEYFQKFKENSKEFTNVRNKKESYERCIAQSFLKDELKLIFKKQREFGFSFSKKFEEEVLSVAFYKRALKDFSHLVGNCSFFTDEKRAPKNSPLAFMFVALTRIINLLNNLKNTEGILYTKDDLNALLNEVLKNGTLTYKQTKKLLGLSDDYEFKGEKGTYFIEFKKYKEFIKALGDHSLNQDDLNEIAKDITLIKDEIKLKKALAKYDLNQNQIDSLSKLEFKDHLNISFKALKLITPLMLEGKKYDEACNELNLKVAINEDKKDFLPAFNETYYKDEVTNPVVLRAIKEYRKVLNALLKKYGKVHKINIELAREVGKNYSQRAKIEKEQNENYKAKKDAELECEKLGLKINSKNILKLRLFKEQKEFCVYSGEKIKISDLQDEKMLEIDHIYPYSRSFDDSYMNKVLVFTKQNQEKLNQTPFEAFGNDSAKWQKIEVLAKNLPTKKQKRILDKNYKDKEQKDFKDRNLNDTRYIARLVLNYTKDYLDFLPLSDDENTKLNDTQKGSKVYVEAKSGMLTSALRHTWGFSTKDRNNHLHHAIDAVIIAYANNSIVKAFSDFKKEQESNSAELYAKKISELDYKNKRKFFEPFSGFRQKVLDKIDEIFVSKPERKKPSGALHEETFRKEEEFYQSYGGKEGVLKALELGKIRKVNGKIVKNGDMFRVDIFKHKKTNKFYAVPIYTMDFALKVLPNKAVARSKKGEIKDWILMDENYEFCFSLYKDSLILIQTKDMQEPEFVYYNAFTSSTVSLIVSKHDNKFETLSKNQKILFKNANEKEVIAKSIGIQNLKVFEKYIVSALGEVTKAEFRQREDFKK

SEQ ID NO: 365 - protein, 984 aa, Campylobacter jejuni
MARILAFDIGISSIGWAFSENDELKDCGVRIFTKVENPKTGESLALPRRLARSARKRLARRKARLNHLKHLIANEFKLNYEDYQSFDESLAKAYKGSLISPYELRFRALNELLSKQDFARVILHIAKRRGYDDIKNSDDKEKGAILKAIKQNEEKLANYQSVGEYLYKEYFQKFKENSKEFTNVRNKKESYERCIAQSFLKDELKLIFKKQREFGFSFLKKFEEEVLSVAFYKRALKDFSHLVGNCSFFTDEKRAPKNSPLAFMFVALTRIINLLNNLKNTEGILYTKDDLNALLNEVLKNGTLTYKQTKKLLGLSDDYEFKGEKGTYFIEFKKYKEFIKALGEHNLSQDDLNEIAKDITLIKDEIKLKKALAKYDLNQNQIDSLSKLEFKDHLNISFKALKLITPLMLEGKKYDEAYNELNLKVAINEDKKDFLPAFNETYYKDEVTNPVVLRAIKEYRKVLNALLKKYGKVHKINIELAREVGKNHSQRAKIEKEQNENYKAKKDAELECEKLGLKINSKNILKLRLFKEQKEFCAYSGEKIKISDLQDEKMLEIDHIYPYSRSFDDSYMNKVLVFTKQNQEKLNQTPFEAFGNDSAKWQKIEVLAKNLPTKKQKRILDKNYKDKEQKDFKDRNLNDTRYIARLVLNYTKDYLDFLPLSDDENTKLNDTQKGSKVHVEAKSGMLTSALRHTWGFSAKDRNNHLHHAIDAVIIAYANNSIVKAFSDFKKEQESNSAELYAKKISELDYKNKRKFFEPFSGFRQKVLDKIDEIFVSKPERKKPSGALHEETFRKEEEFYQSYGGKEGVLKALELGKIRKVNGKIVKNGDMFRVDIFKHKKTNKFYAVPIYTMDFALKVLPNKAVARSKKGEIKDWILMDENYEFCFSLYKDSLILIQTKDMQEPELVYFNAFTSSTVSLIVSKHDNKFETLSKNQKILFKNANEKEVIAKSIGIQNLKVFEKYIVSALGEVTKAEFRQREDFKK

SEQ ID NO: 366 - protein, 984 aa, Campylobacter jejuni
MARILAFDIGISSIGWAFSENDELKDCGVRIFTKVENPKTGESLALPRRLARSARKRLARRKARLNHLKHLIANEFKLNYEDYQSFDESLAKAYKGSLISPYELRFRALNELLSKQDFARVILHIAKRRGYDDIKNSDDKEKGAILKAIKQNEEKLANYQSVGEYLYKEYFQKFKENSKEFTNVRNKKESYERCIAQSFLKDELKLIFKKQREFGFSFSKKFEEEVLSVAFYKRALKDFSHLVGNCSFFTDEKRAPKNSPLAFMFVALTRIINLLNNLKNTEGILYTKDDLNALLNEVLKNGTLTYKQTKKLLGLSDDYEFKGEKGTYFIEFKKYKEFIKALGEHNLSQDDLNEIAKDITLIKDEIKLKKALAKYDLNQNQIDSLSKLEFKDHLNISFKALKLITPLMLEGKKYDEACNELNLKVAINEDKKDFLPAFNETYYKDEVTNPVVLRAIKEYRKVLNALLKKYGKVHKINIELAREVGKNHSQRAKIEKEQNENYKAKKDAELECEKLGLKINSKNILKLRLFKEQKEFCAYSGEKIKISDLQDEKMLEIDHIYPYSRSFDDSYMNKVLVFTKQNQEKLNKTPFEAFGNDSAKWQKIEVLAKNLPTKKQKRILDKNYKDKEQKDFKDRNLNDTRYIARLVLNYTKDYLDFLPLSNDENTKLNDTQKGSKVHVEAKSGMLTSALRHTWGFSTKDRNNHLHHAIDAVIIAYANNSIVKAFSDFKKEQESNSAELYAKKISELDYKNKRKFFEPFSGFRQKVLDKIDEIFVSKPERKKPSGALHEETFRKEEEFYQSYGGKEGVLKALELGKIRKVNGKIVKNGDMFRVDIFKHKKTNKFYAVPIYTMDFALKVLPNKAVARSKKGEIKDWILMDENYEFCFSLYKDSLILIQTKDMQEPEFVYYNAFTSSTVSLIVSKHDNKFETLSKNQKILFKNANEKEVIAKSIGIQNLKVFEKYIVSALGEVTKAEFRQREDFKK

SEQ ID NO: 367 - protein, 984 aa, Campylobacter jejuni
MARILAFDIGISSIGWAFSENDELKDCGVRIFTKVENPKTGESLALPRRLARSARKRLARRKARLNHLKHLIANEFKLNYEDYQSFDESLAKAYKGSLISPYELRFRALNELLSKQDFARVILHIAKRRGYDDIKNSDDKEKGAILKAIKQNEEKLANYQSVGEYLYKEYFQKFKENSKEFTNVRNKKESYERCIAQSFLKDELKLIFKKQREFGFSFSKKFEEEVLSVAFYKRALKDFSHLVGNCSFFTDEKRAPKNSPLAFMFVALTRIINLLNNLKNTEGILYTKDDLNALLNEVLKNGTLTYKQTKKLLGLSDDYEFKGEKGTYFIEFKKYKEFIKALGEHNLSQDDLNEIAKDITLIKDEIKLKKALAKYDLNQNQIDSLSKLEFKDHLNISFKALKLITPLMLEGKKYDEACNELNLKVAINEDKKDFLPAFNETYYKDEVTNPVVLRAIKEYRKVLNALLKKYGKVHKINIELAREVGKNHSQRAKIEKEQNENYKAKKDAELECEKLGLKINSKNILKLRLFKEQKEFCAYSGEKIKISDLQDEKMLEIDHIYPYSRSFDDSYMNKVLVFTKQNQEKLNKTPFEAFGNDSAKWQKIEVLAKNLPTKKQKRILDKNYKDKEQKDFKDRNLNDTRYIARLVLNYTKDYLDFLPLSDDENTKLNDTQKGSKVHVEAKSGMLTSALRHTWGFSTKDRNNHLHHAIDAVIIAYANNSIVKAFSDFKKEQESNSAELYAKKISELDYKNKRKFFEPFSGFRQKVLDKIDEIFVSKPERKKPSGALHEETFRKEEEFYQSYGGKEGVLKALELGKIRKVNGKIVKNGDMFRVDIFKHKKTNKFYAVPIYTMDFALKVLPNKAVARSKKGEIKDWILMDENYEFCFSLYKDSLILIQTKDMQEPEFVYYNAFTSSTVSLIVSKHDNKFETLSKNQKILFKNANEKEVIAKSIGIQNLKVFEKYIVSALGEVTKAEFRQREDFKK

SEQ ID NO: 368 - protein, 984 aa, Campylobacter jejuni
MARILAFDIGISSIGWAFSENDELKDCGVRIFTKVENPKTGESLALPRRLARSARKRLARRKARLNHLKHLIANEFKLNYEDYQSFDESLAKAYKGSLISPYELRFRALNELLSKQDFARVILHIAKRRGYDDIKNSDDKEKGAILKAIKQNEEKLANYQSVGEYLYKEYFQKFKENSKEFTNVRNKKESYERCIAQSFLKDELKLIFKKQREFGFSFSKKFEEEVLSVAFYKRALKDFSHLVGNCSFFTDEKRAPKNSPLAFMFVTLTRIINLLNNLKNTEGILYTKDDLNALLNEVLKNGTLTYKQTKKLLGLSDDYEFKGEKGTYFIEFKKYKEFIKALGEHNLSQDDLNEIAKDITLIKDEIKLKKALAKYDLNQNQIDSLSKLEFKDHLNISFKALKLITPLMLEGKKYDEACNELNLKVAINEDKKDFLPAFNETYYKDEVTNPVVLRAIKEYRKVLNALLKKYGKVHKINIELAREVGKNHSQRAKIEKEQNENYKAKKDAELECEKLGLKINSKNILKLRLFKEQKEFCAYSGEKIKISDLQDEKMLEIDHIYPYSRSFDDSYMNKVLVFTKQNQEKLNKTPFEAFGNDSAKWQKIEVLAKNLPTKKQKRILDKNYKDKEQKDFKDRNLNDTRYIARLVLNYTKDYLDFLPLSDDENTKLNDTQKGSKVHVEAKSGMLTSALRHTWGFSTKDRNNHLHHAIDAVIIAYANNSIVKAFSDFKKEQESNSAELYAKKISELDYKNKRKFFEPFSGFRQKVLDKIDEIFVSKPERKKPSGALHEETFRKEEEFYQSYGGKEGVLKALELGKIRKVNGKIVKNGDMFRVDIFKHKKTNKFYAVPIYTMDFALKVLPNKAVARSKKGEIKDWILMDENYEFCFSLYKDSLILIQTKDMQEPEFVYYNAFTSSTVSLIVSKHDNKFETLSKNQKILFKNANEKEVIAKSIGIQNLKVFEKYIVSALGEVTKAEFRQREDFKK

SEQ ID NO: 369 - protein, 984 aa, Campylobacter jejuni
MARILAFDIGISSIGWAFSENDELKDCGVRIFTKVENPKTGESLALPRRLARSARKRLARRKARLNHLKHLIANEFKLNYEDYQSFDESLAKAYKGSLISPYELRFRALNELLSKQDFARVILHIAKRRGYDDIKNSDDKEKGAILKAIKQNEEKLANYQSVGEYLYKEYFQKFKENSKEFTNVRNKKESYERCIAQSFLKDELKLIFKKQREFGFSFSKKFEEEVLSVAFYKRALKDFSHLVGNCSFFTDEKRAPKNSPLAFMFVALTRIINLLNNLKNTEGILYTKDDLNALLNEVLKNGTLTYKQTKKLLGLSDDYEFKGEKGTYFIEFKKYKEFIKALGEHNLSQDDLNEIAKDITLIKDEIKLKKALAKYDLNQNQIDSLSKLEFKDHLNISFKALKLITPLMLEGKKYDEACNELNLKVAINEDKKDFLPAFNETYYKDEVTNPVVLRAIKEYRKVLNALLKKYGKVHKINIELAREVGKNHSQRAKIEKEQNENYKAKKDAELECEKLGLKINSKNILKLRLFKEQKEFCAYSGEKIKISDLQDEKMLEIDHIYPYSRSFDDSYMNKVLVFTKQNQEKLNKTPFEAFGNDSAKWQKIEVLAKNLPTKKQKRILDKNYKDKEQKDFKDRNLNDTRYIARLVLNYTKDYLDFLPLSDDENTKLNDTQKGSKVHVEAKSGMLTSALRHTWGFSTKDRNNHLHHAIDAVIIAYANNSIVKAFSDFKKEQESNSAELYAKKISELDYKNKRKFFEPFSGFRQKVLDKIDEIFVSKPERKKPSGALHEETFRKEEEFYQSYGGKEGVLKALELGKIRKVNGKIVKNGDMFRVDIFKHKKTNKFYAVPIYTMDFALKVLPNKAVARSKKGEIKDWILMDENYEFCFSLYKDSLILIQTKDMQEPEFVYYNAFTSSTVSLIVSKHDNKFETLSKNQKILFKNANEKEVIAKSIGIQNLKVFEKYIVSALGEVTKAEFIQREDFKK

SEQ ID NO: 370 - protein, 987 aa, Campylobacter jejuni
MARILAFDIGISSIGWAFSENDELKDCGVRIFTKVENPKTGESLALPRRLARSARKRLARRKARLNHLKHLIANEFKLNYEDYQSFDESLAKAYKGSLISPYELRFRALNELLSKQDFARVILHIAKRRGYDDIKNSDDKEKGAILKAIKQNEEKLANYQSVGEYLYKEYFQKFKENSKEFTNVRNKKESYERCIAQSFLKDELKLIFKKQREFGFSFSKKFEEEVLSVAFYKRALKDFSHLVGNCSFFTDEKRVPKNSPLAFMFVALTRIINLLNNLKNTEGILYTKDDLNALLNEVLKNGTLTYKQTKKLLGLSDDYEFKGEKGTYFIEFKKYKEFIKALGEHNLSQDDLNEIAKDITLIKDEIKLKKALAKYDLNQNQIDSLSKLEFKDHLNISFKALKLITPLMLEGKKYDEACNELNLKVAINEDKKDFLPAFNETYYKDEVTNPVVLRAIKEYRKVLNALLKKYGKVHKINIELAREVGKNHSQRAKIEKEQNENYKAKKDAELECEKLGLKINSKNILKLRLFKEQKEFCAYSGEKIKISDLQDEKMLEIDHIYPYSRSFDDSYMNKVLVFTKQNQEKLNQTPFEAFGNDSAKWQKIEVLAKNLPTKKQKRILDKNYKDKEQKNFKDRNLNDTRYIARLVLNYTKDYLDFLPLSDDENTKLNDTQKGSKVHVEAKSGMLTSALRHTWGFSAKDRNNHLHHAIDAVIIAYANNSIVKAFSDFKKEQESNSAELYAKKISELDYKNKRKFFEPFSGFRQKVLDKIDEIFVSKPERKKPSGALHEETFRKEEEFYQSYGGKEGVLKALELGKIRKVNGKIVKNGDMFRVDIFKHKKTNKFYGVPIYTMDFALKVLPNKAVARSKKGEIKDWILMDENYEFCFSLYKDSLILIQTKDMQEPEFVYYNAFTSSTVSLIVSKHDNKFETLSKNQKILFKNANEKEVIAKSIGIQNLKVFEKYIVSALGEVTKAEFRQREDFKNELR

SEQ ID NO: 371 - protein, 984 aa, Campylobacter jejuni
MARILAFDIGISSIGWAFSENDELKDCGVRIFTKVENPKTGESLALPRRLARSARKRLARRKVRLNHLKHLIANEFKLNYEDYQSFDESLAKAYKGSLISPYELRFRALNELLSKQDFARVILHIAKRRGYDDIKNSDDKEKGAILKAIKQNEEKLANYQSVGEYLYKEYFQKFKENSKEFTNVRNKKESYERCIAQSFLKDELKLIFKKQREFGFSFSKKFEEEVLSVAFYKRALKDFSHLVGNCSFFTDEKRAPKNSPLAFMFVALTRIINLLNNLKNTEGILYTKDDLNALLNEVLKNGTLTYKQTKKLLGLSDDYEFKGEKGTYFIEFKKYKEFIKALGEHNLSQDDLNEIAKDITLIKDEIKLKKALAKYDLNQNQIDSLSKLEFKDHLNISFKALKLITPLMLEGKKYDEACNELNLKVAINEDKKDFLPAFNETYYKDEVTNPVVLRAIKEYRKVLNALLKKYGKVHKINIELAREVGKNHSQRAKIEKEQNENYKAKKDAELECEKLGLKINSKNILKLRLFKEQKEFCAYSGEKIKISDLQDEKMLEIDHIYPYSRSFDDSYMNKVLVFTKQNQEKLNKTPFEAFGNDSAKWQKIEVLAKNLPTKKQKRILDKNYKDKEQKDFKDRNLNDTRYIARLVLNYTKDYLDFLPLSDDENTKLNDTQKGSKVHVEAKSGMLTSALRHTWGFSTKDRNNHLHHAIDAVIIAYANNSIVKAFSDFKKEQESNSAELYAKKISELDYKNKRKFFEPFSGFRQKVLDKIDEIFVSKPERKKPSGALHEETFRKEEEFYQSYGGKEGVLKALELGKIRKVNGKIVKNGDMFRVDIFKHKKTNKFYAVPIYTMDFALKVLPNKAVARSKKGEIKDWILMDENYEFCFSLYKDSLILIQTKDMQEPEFVYYNAFTSSTVSLIVSKHDNKFETLSKNQKILFKNANEKEVIAKSIGIQNLKVFEKYIVSALGEVTKAEFRQREDFKK

SEQ ID NO: 372 - protein, 721 aa, Campylobacter jejuni
MFVALTRIINLLNNLKNTEGILYTKDDLNTLLNEVLKNGTLTYKQTKKLLGLSDDYEFKGEKGTYFIEFKKYKEFIKALGDHSLSQDDLNEIAKDITLIKDEIKLKKALAKYDLNQNQIDSLSKLEFKDHLNISFKALKLITPLMLEGKKYDEACNELNLKVAINEDKKDFLPAFNETYYKDEVTNPVVLRAIKEYRKVLNALLKKYGKVHKINIELAREVGKNYSQRAKIEKEQNENYKAKKDAELECEKLGLKINSKNILKLRLFKEQKEFCAYSGEKIKISDLQDEKMLEIDHIYPYSRSFDDSYMNKVLVFTKQNQEKLNQTPFEAFGNDSAKWQKIEVLAKNLPTKKQKRILDKNYKDKEQKDFKDRNLNDTRYIARLVLNYTKDYLDFLPLSDDENTKLNNTQKGSKVYVEAKSGMLTSALRHTWGFSTKDRNNHLHHAIDAVIIAYANNSIVKAFSDFKKEQESNSAELYAKKISELDYKNKRKFFEPFSGFRQKVLDKIDEIFVSKPERKKPSGALHEETFRKEEEFYQSYGGKEGVLKALELGKIRKVNGKIVKNGDMFRVDIFKHKKTNKFYAVPIYTMDFALKVLPNKAVARSKKGEIKDWILMDENYEFCFSLYKDSLILIQTKDMQEPEFVYYNAFTSSTVSLIVSKHDNKFETLSKNQKILFKNANEKEVIAKSIGIQNLKVFEKYIVSALGEVTKAEFRQREDFKK

SEQ ID NO: 373 - protein, 512 aa, Campylobacter jejuni
MHKINIELAREVGKNHSQRAKIEKEQNENYKAKKDAEIECEKLGLKINSKNILKLRLFKEQKEFCAYSGEKIKLSDLQDEKMLEIDHIYPYSRSFDDSYMNKVLVFTKQNQEKLNKTPFEAFGNDSTKWQKIEVLAKNLPEKKQKRILDKNYKDKEQKDFKDRNLNDTRYIARLVLNYTKDYLDFLPLSDDENTKLNDTQKGSKVHVEAKSGMLTSALRHTWGFSAKDRNNHLHHAIDAAIIAYANNSIVKAFSDFKKEQESNSVELYAKKISELDYKNKRKFFEPFSGFRQKVLDKIDEIFVSKPERKKPSGALHEETFRKEEEFYQSYGGKEGVLKALELGKIRKVNGKIVKNGDMFRVDIFKHKKTNKFYAVPIYTMDFALKVLPNKAVARSKKGEIKDWILMDENYEFCFSLYKDSLILIQTKDMQEPELVYFNAFTSSTVSLIVSKHDNKFETLSKNQKILFKNANEKEVIAKSIGIQNLKVFEKYIVSALGEVTKAEFRQREDFKK

SEQ ID NO: 374 - protein, 965 aa, Campylobacter jejuni
MKIIGFNLGIANIGWALRENDEIIDCGVRVFDIPENPKNGNSLALERRENKARMKIVKRKKARMLATKTFLKKELNVDLSKLFLIGSTQSIYELRAKALSSLISKEELSAIILHIAKHRGYDDSALKNENGTIIEALNKNKETMLKFKSVGEYFYKNFVQNKEVKKIRNTTEDYSNSVPRSLLKQELDLILDKQKELGLIKNADFKEKLFEIIFFKRPLKDFSNKIGNCIFFENEKRAAKNTISACEFVALGKVVNLLKSIEKDIGIVYEKDSINEIMSIILDKTSISYKKIRDILNLPQEINFKGLDYSKNNVENSKLVDLKKLNEFKKALGDGFANLDKDILDSIATDITLTKDTATLKEKLKNYNVLNAEQIEKLSELVFNDHINLSLKALKQIIPLMYEGKRYDEACELCNFTIAKNQEKSEYLPLFEKTRFAKDISSPVVIRAICEFRKLLNDIIRRYGSVHKIHLELTRDFGISFSDRKKIIKEIEQNEQSRIKALETIKELKLEETSKNIQIVRLFEDQKGICPYSGLKMDLNRLDELVIDYIRPYNRSLDDSYSNKVLTFKKLSDLKQGKTPFEAFGEDEKLWAEINERIKEYNGKKRFKIFDKFFKDKKPFDFTEQTLQDTRWLTKLVASYLNEYLSFLPISEDENTALGYGEKGSKQHVILSSGMITQMLRNFWYLGFKNHKDYKNNAMDAIIVAFTTNSIIFAFNNFKKELDLAKAEFYANKISESDYLLKRKFLPPFSGFKEQALEKVKNIFVSHSLKIKNKGTLHDLTPLKIKELKNTYGDLDLAVKLGKIRKYNDKYYANANGSLVRADLFVDKKNKFHAVSIYKADFSTKKLPNKTPATTSNGETKEGIEMNENYNFCMSLYKNTPISVKIKGMKEPIICYYHGFNTSGSKITYKKHDNNYHNLSEDEMVVFRKNDKESIAVGKILEIKKYSISPSGELSLIENEERKWF

SEQ ID NO: 375 - protein, 759 aa, Campylobacter jejuni
MLSVAFYKRALKDFSHLVGNCSFFTDEKRAPKNSPLAFMFVALTRIINLLNNLKNTEGILYTKDDLNALLNEVLKNGTLTYKQTKKLLGLSDDYEFKGEKGTYFIEFKKYKEFIKALGEHNLSQDDLNEIAKDITLIKDEIKLKKALAKYDLNQNQIDSLSKLEFKDHLNISFKALKLITPLMLEGKKYDEACNELNLKVAINEDKKDFLPAFNETYYKDEVTNPVVLRAIKEYRKVLNALLKKYGKVHKINIELAREVGKNHSQRAKIEKEQNENYKAKKDAELECEKLGLKINSKNILKLRLFKEQKEFCAYSGEKIKISDLQDEKMLEIDHIYPYSRSFDDSYMNKVLVFTKQNQEKLNKTPFEAFGNDSAKWQKIEVLAKNLPTKKQKRILDKNYKDKEQKDFKDRNLNDTRYIARLVLNYTKDYLDFLPLSDDENTKLNDTQKGSKVHVEAKSGMLTSALRHTWGFSTKDRNNHLHHAIDAVIIAYANNSIVKAFSDFKKEQESNSAELYAKKISELDYKNKRKFFESFSGFRQKVLDKIDEIFVSKPERKKPSGALHEETFRKEEEFYQSYGGKEGVLKALELGKIRKVNGKIVKNGDMFRVDIFKHKKTNKFYAVPIYTMDFALKVLPNKAVARSKKGEIKDWILMDENYEFCFSLYKDSLILIQTKDMQEPEFVYYNAFTSSTVSLIVSKHDNKFETLSKNQKILFKNANEKEVIAKSIGIQNLKVFEKYIVSALGEVTKAEFRQREDFKK

SEQ ID NO: 376 - protein, 984 aa, Campylobacter jejuni
MVRILAFDIGISSIGWAFSENDELKDCGVRIFTKVENPKTGESLALPRRLARSARKRLARRKARLNHLKHLIANEFKLNYEDYQSFDESLAKAYKGSLISPYELRFRALNELLSKQDFARVILHIAKRRGYDDIKNSDDKEKGAILKAIKQNEEKLANYQSVGEYLYKEYFQKFKENSKEFTNVRNKKESYERCIAQSFLKDELKLIFKKQREFGFSFSKKFEEEVLSVAFYKRALKDFSHLVGNCSFFTDEKRAPKNSPLAFMFVALTRIINLLNNLKNTEGILYTKDDLNALLNEVLKNGTLTYKQTKKLLGLSDDYEFKGEKGTYFIEFKKYKEFIKALGEHNLSQDDLNEIAKDITLIKDEIKLKKALAKYDLNQNQIDSLSKLEFKDHLNISFKALKLITPLMLEGKKYDEACNELNLKVAINEDKKDFLPAFNETYYKDEVTNPVVLRAIKEYRKVLNALLKKYGKVHKINIELAREVGKNHSQRAKIEKEQNENYKAKKDAELECEKLGLKINSKNILKLRLFKEQKEFCAYSGEKIKISDLQDEKMLEIDHIYPYSRSFDDSYMNKVLVFTKQNQEKLNKTPFEAFGNDSAKWQKIEVLAKNLPTKKQKRILDKNYKDKEQKDFKDRNLNDTRYIARLVLNYTKDYLDFLPLSDDENTKLNDTQKGSKVHVEAKSGMLTSALRHTWGFSTKDRNNHLHHAIDAVIIAYANNSIVKAFSDFKKEQESNSAELYAKKISELDYKNKRKFFEPFSGFRQKVLDKIDEIFVSKPERKKPSGALHEETFRKEEEFYQSYGGKEGVLKALELGKIRKVNGKIVKNGDMFRVDIFKHKKTNKFYAVPIYTMDFALKVLPNKAVARSKKGEIKDWILMDENYEFCFSLYKDSLILIQTKDMQEPEFVYYNAFTSSTVSLIVSKHDNKFETLSKNQKILFKNANEKEVIAKSIGIQNLKVFEKYIVSALGEVTKAEFRQREDFKK

SEQ ID NO: 377 - protein, 1003 aa, Campylobacter lari]
MRILGFDIGINSIGWAFVENDELKDCGVRIFTKAENPKNKESLALPRRNARSSRRRLKRRKARLIAIKRILAKELKLNYKDYVAADGELPKAYEGSLASVYELRYKALTQNLETKDLARVILHIAKHRGYMNKNEKKSNDAKKGKILSALKNNALKLENYQSVGEYFYKEFFQKYKKNTKNFIKIRNTKDNYNNCVLSSDLEKELKLILEKQKEFGYNYSEDFINEILKVAFFQRPLKDFSHLVGACTFFEEEKRACKNSYSAWEFVALTKIINEIKSLEKISGEIVPTQTINEVLNLILDKGSITYKKFRSCINLHESISFKSLKYDKENAENAKLIDFRKLVEFKKALGVHSLSRQELDQISTHITLIKDNVKLKTVLEKYNLSNEQINNLLEIEFNDYINLSFKALGMILPLMREGKRYDEACEIANLKPKTVDEKKDFLPAFCDSIFAHELSNPVVNRAISEYRKVLNALLKKYGKVHKIHLELARDVGLSKKAREKIEKEQKENQAVNAWALKECENIGLKASAKNILKLKLWKEQKEICIYSGNKISIEHLKDEKALEVDHIYPYSRSFDDSFINKVLVFTKENQEKLNKTPFEAFGKNIEKWSKIQTLAQNLPYKKKNKILDENFKDKQQEDFISRNLNDTRYIATLIAKYTKEYLNFLLLSENENANLKSGEKGSKIHVQTISGMLTSVLRHTWGFDKKDRNNHLHHALDAIIVAYSTNSIIKAFSDFRKNQELLKARFYAKELTSDNYKHQVKFFEPFKSFREKILSKIDEIFVSKPPRKRARRALHKDTFHSENKIIDKCSYNSKEGLQIALSCGRVRKIGTKYVENDTIVRVDIFKKQNKFYAIPIYAMDFALGILPNKIVITGKDKNNNPKQWQTIDESYEFCFSLYKNDLILLQKKNMQEPEFAYYNDFSISTSSICVEKHDNKFENLTSNQKLLFSNAKEGSVKVESLGIQNLKVFEKYIITPLGDKIKADFQPRENISLKTSKKYGLR

SEQ ID NO: 378 - protein, 372 aa, candidate division
DNESAINQIAYILTTQKADEGIRAELDSLPLSDKAKKAIVKIKPTNFKAFGHLSIKALQKITPHILEGMTYDKACEAAGYDFKKQSASLEQITNPVVKRAITQTLKVVRAIERKYGKPYFIKVETARDLAKNFKDRNAIKKENEENQGYNEDIKSIITNGYEASPKTKGGKQLLNHLKEFNVRLNKNADFNGQQIIKVKLYREQQGKCLYSGNPIDFETMLRDDNAYQVDHIVPFSRSNNDGITNKVLVFTEENQKKADRTPFEYFGTDERRWEKFVALVETTYKTRDVKTSDKATNAINYEYNGYAMKKKQNLLLQDYKNDSWNVRALNDTRYITRFIQNYLRQNVDFAEGEEKQRIIAPNGTTTAYLRKR

SEQ ID NO: 379 - protein, 1117 aa, Capnocytophaga ochracea
MKHILGLDLGSNSIGWAFVQQDFENKQGKIIATGSRIIPMDQGILGDFERGNTVSQTAERTTYRSMRRLRERHLLRRERLHRVLHLLGFLPPHYDAQIDFTKRYGKFIDNAEPKIAYNNGNFIFMNSFNEMVEDFKKHQPQLFYKKSNGEESRIPYDWTIYYLRKKALSQKITQQELAWLILHFNQKRGYYQLRGEEETENPNKEVAFHSLKVVDVEAEAPNKKGEIWYTIRLENGWIYRRTSKNPLDDWKGKTRDFIVTTDLNDDGTIKLDKEGKEKRSFRAPDENDWNLLKKKTEHDIDFSGKPVGTYIYDHLLQNPNQKIKGKLVRTIERKYYKDELKAILAKQIALQPELFTETLLADCIRELYRKNETQQQNLLSKDFLHLFVEDIIFYQRPLCSKKSTIANCTLEKRSYIDKETNERKDAPIKVCAKSNPYYQEFRVLQWLQNLRIYEIETDREVTAEFIETPQDYEALFNFLMSQKEIDNEGLLKYFLFAKNPQIKDKAAKSELKKWLTTYRWNYVYDAADNSSKKYPMNETGYELQRYLQKVEGLPANFLTFDITYQLWHLLYSVKDKVEFEKALKKFAKKKQLDKTSFVDSFKNFKPYPNEYGSFSEKAIKKLLPLMRFGNHWDFNRIDVSTQKRIDDLINGVANEDIRTIIREKAEKYQLNSETCFQDLPLWLAQYVVYNRHAEATDIEKWTSVSDLEAYLEDFKQHSLRNPIVEQVVTETLRVVRDIWQQYSGGQANFFDEIHIELGRELKKTAEERKQLSDKNQENENTNLRIKKLLAELKEDASIQNVRPYSLVQQELLKIYEEGVFSSTDEIEEDIQKIRKKVEPTPPEIQRYKLWLEQKYKSPYTGEVISLTKLFTEEYEIEHIIPQSRYYDDSLSNKVICESAVNKLKTNQLGLEFIQNHHGEKVRITANKEVTIFTEEQYKEFVKKHYANNSAKQQKLLLNEIPEKMVARQLNDTRYISKCISEILSKIVRSDEKDEGVNSKNIIPCTGKITTALKQDWGLNDVWNELILPRFERMNQLTQTQLFTSYNDRLQKNLPTVPIEYSQGFQKKRIDHRHHAMDALVIACATREHINYMNNQHALDKSKDKKEKQQSRIDLHPL

SEQ ID NO: 380 - protein, 303 aa, Capnocytophaga ochracea
MSFKQNLRVINKATNYYEKWEEKNGVLVKKKVKQEGTNWAIRKPLHKETVSGKIVLDRKIGKDKILTATRKAVDITFTEKIISSITDTGIQKILLNYLKYKGSPEVAFSAEGLEELNKNIAQYNDGKKHQPIYKVRIFEEGSKFPLGETGAKATKYVEAAKGTNLFFGVYQGKEKRTYATIPLNEVIERQKQGLPSVPERNEKGEPLLFSLSPNDLVYVPMEGEIAETIDFNNLSKEQKERIYKTVSFTGNQCFFVQEAVASPIVNKMEYSPLNKMERDILGIMIKEVCVKLKVDRLGNIIKA

SEQ ID NO: 381 - protein, 1471 aa, Capnocytophaga sp.
MCKYFYIKNFITFVLSKSIIPMKHILGLDLGSNSIGWAFVQQDFENKQGKIIATGSRIIPMDQGILGDFERGNTVSQTAERTTYRSTRRLRERHLLRRERLHRVLHILGFLPPHYDAQIDFTKRYGKFIDNAEPKIAYNNGNFIFMNSFNEMIEDFKKHQPQLFYKKSNGEESKIPYDWTIYYLRKKALSQKITQQELAWLILHFNQKRGYYQLRGEEETENPNKEVAFHSLKVVDVEAEAPNKKGEIWYTIRLENGWIYRRTSKIPLDDWKGKTRDFIVTTDLNDDGTIKVDKEGKEKRSFRAPDENDWNLLKKKTEHDIDFSGKTVGAYIYDHLLQNPNQKIKGKLVRTIERKYYKDELKAILAKQIALQPELFTETLLADCIRELYRKNETQQQNLLSKDFLHLFVEDIIFYQRPLRSKKSTIANCTLEKRSYIDKETNERKDAPIKVCAKSNPYYQEFRVLQWLQNLRIYEIETDREVTAEFIETPQDCEALFNFLMSQKEIDNKGLLKYFLFAKNPQIKDKAAKSELKKWLTTYRWNYVYDAADNSSKKYPMNETGYELQRYLQKVEGLPANFLTFDITYQLWHLLYSVKDKVEFEKALKKFAKKKQLDKTSFVDSFKNFKPYPNEYGSFSEKAIKKLLPLMRFGNHWDFNRIDVSTQKRIDDLINGVANEDIRTIIREKAEKYQLNSETCFQDLPLWLAQYVVYNRHAEATDIEKWTSVSDLEAYLEDFKQHSLRNPIVEQVVTETLRVVRDIWQQYGGGQANFFDEIHIELGRELKKTAEERKQLSDKNQENESTNLRIKKLLAELKEDASIQNVRPYSLVQQELLKIYEEGVFSATDEVEEDIQKIRKKAEPSKADLQRYKLWLEQKYKSPYTGEVISLTKLFTEEYEIEHIIPQSRYYDDSLSNKVICESAVNKLKTNQLGLEFIQNHHGEKVRITANKEVTIFTEEQYKEFVKKHYANNSAKQQKLLLNEIPEKMVARQLNDTRYISKYISEILSKIVRSDEKDEGVNSKNIIPCTGKITTALKQDWGLNDVWNKLILPRFERMNQLTQTQLFTSYNDRLQKNLPTVPIEYSQGFQKKRIDHRHHAMDALVIACATREHINYMNNQHALDKSKDKKEKQQSRIDLRTILCEKKNNNWQFKKPWSTFTQEAKEALEHIVVSFKQNLRVINKATNYYEKWEEKNGVLVKKKVKQEGTNWAIRKPLHKETVSGKIVLDRKIGKDKILTATRKAVDITFTEKIISSITDTGIQKILLNYLKYKGSPEVAFSTEGLEELNKNIAQYNNGKKHQPIYKVRIFEEGSKFPLGETGAKATKYVEAAKGTNLFFGVYQGKGKRTYATIPLNEVIERQKQGLPSVPERNEKGEPLLFSLSPNDLVYVPMEGEIAETIDFNNLSKEQKERIYKTVSFTGNQCFFVQEAVATPIVNKMEYSPLNKMERDILGTMIKEVCIKLKVDRLGNITKA

SEQ ID NO: 382 - protein, 1450 aa, Capnocytophaga sp.
MKHILGLDLGSNSIGWAFVQQDFENKQGKIIATGSRIIPMDQGILGDFERGNTVSQTAERTTYRNTRRLRERHLLRRERLHRVLHILGFLPPHYDSQIDFTKRYGKFIDNAEPKIAYNNGNFIFMNSFNEMIEDFKKYQPQLFYKKSNGEESKIPYDWTIYYLRKKALSQKITQQELAWLILHFNQKRGYYQLRGEEETENPNKEVAFHSLEVVDVEAEAPNKKGEIWYTIRLENGWIYRRTSKIPLDDWKGKTRDFIVTTDLNDDGTIKLDKEGKEKRSFRAPDENDWNLLKKKTEHDIDFSGKTVGAYIYDHLLQNPNQKIKGKLVRTIERKYYKDELKAILAKQIALQPELFTETLLADCIRELYRKNETQQQNLLSKDFLHLFVEDIIFYQRPLRSKKSTIANCTLEKRSYIDKETNERKDTPIKVCAKSNPYYQEFRVLQWLQNLRIYEIETDREVTAEFIETAQDNEALFNFLMSQKEIDNESLLKYFLFAKNPQIKDKVAKSELKKWLTTYRWNYVYDAADNSSKKYPMNETGYELQQYLQKVEGLPANFLTFDITYRLWHLLYSVKDKVEFEKALKKFAQEYQLDEASFVDSFKNFKPYPNEYGSFSEKAIKKLLPLMRFGNHWDFNRIDVSTQKRIDDLINGVANDEIRTIIREKAEKYQLNSETCFQGLPLWLAQYVVYNRHAEAADIEKWTSVNDLEAYLEDFKQHSLRNPIVEQVITETLRVVRDIWQRYGGGQANFFDEIHIELGRELKKTAEERKQLSNRNQENENTNLRIKKLLAELKEDASIQNVRPYSPVQQELLKIYEEGVFSATDEVEEDIQKIRKKAEPTTPEIQRYKLWLEQKYKSPYTGEVISLTKLFTEEYEIEHIIPQSRYYDDSLSNKVICESAVNKLKTNQLGLEFIQNHHGEKVRITANKEVTIFTEEQYKEFVKKHYANNSAKQQKLLLNEIPEKMVARQLNDTRYISKYISEILSKIVRSDEKDEGVNSKNIIPCTGKITTALKQDWGLNDVWNELILPRFERMNQLTQTQLFTSYNDRFQKNLPTVPIEYSQGFQKKRIDHRHHAMDALVIACATREHINYMNNQHALDKSKDKKEKQQSRIDLRTILCEKKNNNWQFKKPWSTFTQEAQEALEHIVVSFKQNLRVINKATNYYEKWEEKNGVLVKKKVKQEGTNWAIRKPLHKETVSGKIVLDRKIGKDKILTATRKSVDITFTEKIISSITDTGIQKILLNYLKYKGSPEVAFSAEGLEELNKNIAQYNDGKKHQPIYKVRIFEEGSKFPLGETGAKATKYVEAAKGTNLFFGVYQGKGKRTYATIPLNEVIERQKQGLPSVPERNEKGEPLLFSLSPNDLVYVPMEGEIAETIDFNNLSKEQKERIYKTVSFTGNQCFFVQEAVATPIVNKIEYSPLNKMERDILGTMIKEVCIKLKVDRLGNITKA

SEQ ID NO: 383 - protein, 1435 aa, Capnocytophaga sp.
MKNILGLDLGTTSIGFAHIVEDENKEKSEIKELGVRIVSLATDEQSDFEKGKSISTNANRTLKHGARLNLDRYQQRRKFLIDLLQKANLITSASILAENGKNTTHSTWQLRAKAVTERIEKEEFARVLLAINKKRGYKNSRKTKTEDEGQAIDGMAIAKCLYDENLTPGQLSLQLLQQNKKLLPDFYRSDLQKEFDLVWNLQKQFYPDILTDSFYKELQGKGKDATSKAFSKRYHFDTAENKGSKESVRLQAYQWRAEAISKQLSKEEVAYVLTEINNNLNNSSGYLGAISDRSKELYFNRQTVGQYLYAQLQENRHNSLKNKVFYRQDYLDEFERIWETQASFHKELTDELKKQIRDVVIFYQRKLKSQKGLVSFCEFESKEIEIEKDGKAITKSIGARVVPKSSPLFQEFKIWQILNNVTCKRKGIRKKKSSAKSTELDLFNEPSQSIFSLDMECKQLLFDELNLKGDLKSDKVLKLLGYSPQEWEINYNQLEGNRTQKSLYEAYLKIIEIEGYEVKDILQIKSTKDDWSLDESPLSASEIRERVKVIFQTLGICTKILYFDPLLPVKEFEQQYSYQLWHLLYSYESDDSTSGNETLYRILEKKYAFKREHATILANVALQDDYGSLSTKAIRKIYPYIKENQYSTACELAGYKHSKLSLTTEELEARELKNIIPLLKKNALRNPVVEKILNQMINVVNALIEKNSERDAEGKITKYFHFDEIRIELARELKKNAQERYEMTQNINKAKLEHQKISEKLQKQFGIKNPTKSDIIRYRLYQELEHNGYKELYTNTYIAPDVLFSKNIDIEHIVPKARVFDDSFSNKTLAFKEFNIKKGESTAFDYITSLNCEGELNQYLTRVENAYKTKSISLTKYKNLLKKASEIGDGFINRDLRDTQYIAKKAKEILFQVTKNVLSTSGSITDRLREDWGLVDVMKELNMPKYQSLGLTEVEERKDGNKVTVIKDWTKRNDHRHHAMDALTVAFTKPSYIQYLNHLNARKDENNKNYSVILAIEKKETIKVPINNGKNKRVFIEPILNFRQVAKKHLEEIFISHKAKNKVVTKNINKPAGTDKQQITLTPRGQLHKETIYGKYQYYVNKEEKVGVKFDERTITKVSNPLYREALLKRLQANDNDPKKAFAGKNALSKNPIYLDEAKTKTLPEKVNLTYLEEDFSIRKDISPDNFKDLKSIEKVIDQGVKRILIKRLQAYDNDPKKAFVDLEKNPIWLNKEKGIAIKRVTISGVSNAQPLHIGKDHLGKTTLNKEGKEVPVDYVSTGNNHHVAIYRDKEGNLQEQIVSFFEAVVRAQQGLPIIDKNYKQAEGWQFMFTMKQNEMFVFPNEATGFNPAEIDLLDPKNKKLISPNLFRVQTISIVKYGNSVVRDFKFRHHLETTLQDDKILQGITFQQIKSLEPLRNIVKVRINHLGDIVNIGEY

SEQ ID NO: 384 - protein, 1432 aa, Capnocytophaga sp.
MKNILGLDLGTTSIGFAHIVEDENKEKSEIKELGVRIVSLTTDEQSDFEKGKSITTNANRTLKHGARLNLDRYQQRRKYLIDLLHKANLITPSSILAENGKNTTHSTWQLRAKAVTERIEKEEFARILLAINKKRGYKSSRKAKTEDEGQAIDGMAIAKRLYDENLTPGQLSLQLLQQNKKLLPDFYRSDLQKEFDLVWNFQKQFYPDILTDIFYKELQGKGKDATSKAFSKRYHFDTAENKGSKESVRLQAYQWRAEAVSKQLSKEEVAYVLTEINNNLNNASGYLGAISDRSKELYFNRQTVGQYLYAQLQENRHNSLKNKVFYRQDYLDEFERIWETQALFHKELTDELKKQIRDVVIFYQRKPKSQKGLISFCEFESKEIEIEKDGKTITKNIGARVVPKSSPLFQEFKIWQILNNVICKRKGIRKKKISAKTTQLDLLNESSQTIFSLDMECKQLLFDELNLKGDLKSDKVLKLLGYSPQEWEINYNQLEGNRTQKALYEAYLKIVEMEAHDVKDILQIKSTKDDWSLDESPLSASEIRESVKAIFQALGICTKILYFDPLLPVKDFEEQDSYQLWHLLYSYESDDSTSGNETLYRILEKKYAFKREHARILANVALQDDYGSLSTKAIRKIYPNIKENQYSTACEMAGYKHSKLSLTTEELEARELKNIIPLLKKNALRNPVVEKILNQMINVVNALIEKNSERDAEGKITKYFHFDEIRIELARELKKNAQKRYEMTQNINKAKSEHQKISEILQKEFGIKNPTKSDIIRYRLYKELEHNGYKELYTNTYIAPDVLFSKNIDIEHIVPKARVFDDSFSNKTLAFKDFNIKKGESTAFDYITSLKNEEKLNQYLARVENAYKTKNISPAKYKNLLKKASEIGDGFINRDLRDTQYIAKKAKEILFQVTKNVLSTSGSITDRLREDWSLVDVMKELNMPKYQSLGLTEVEERKDGNKVTVIKDWTKRNDHRHHAMDALTVAFTKPSYIQYLNHLNARKDENNKNYSVILAIEKKETIKVPTNNGKNKRVFIEPIPNFRQVAKKHLEEIFISHKAKNKVVTKNTNKPAGTNKQQITLTPRGQLHKETIYGKYQYYVNKEEKVGVKFDKETIAKVSNPLYREALLKRLQANDNDPKKAFTGKNALSKNPIYLDEAKTKTLPEKVNLTYLEEDFSVRKKIVPKNPTSKEFVPNLKSIEKVVDEGVRNILIERLRVYNNDPEKAFVDLEKNPIWLNKEKGIAIKRVTISGVNNAQPLHIGKDHLGKTTLNKEGKEIPVDYVSTGNNHHVAIYRDKEGNLQEQIVSFFEAVVRTQQGLPIIDKTYKQEEGWQFLFTMKQNEMFVFPNEATGFNPAEIDLLDPKNKKQISPNLFRVQKIATKDYFFRHHLETNVETDNVLKNTTWKREGLSGLKDIVKVRINHLGDIVSIGEY

SEQ ID NO: 385 - protein, 1426 aa, Capnocytophaga sp.
MKNILGLDLGTTSIGFTHIVEDENKEKSEIKELGVRIVSLTTDEQSDFEKGKSISTNANRTLKHGARLNLDRYQQRRKFLIDLLQKANLITSSSILAENGKNTTHSTWQLRAKAVTERIEKEEFARVLLAINKKRGYKSSRKAKTEDEGQAIDGMAIAKRLYDENLTPGQLSLQLLQQNKKLLPDFYRSDLQKEFDLVWNFQKQFYPDILTDSFYKELQGKGKDATSKAFSKRYHFDTAENKGSRESVRLQAYQWRAEAISKQLSKEEVAYVLTEINNNLNNASGYLGAISDRSKELYFNRQTVGQYLYAQLQENKHNSLKNKVFYRQDYLDEFERIWETQASFHKELTEELKKQIRDVVIFYQRKLKSQKGLISFCEFESKEIEIEKDGKTITKSIGARVVPKSSPLFQEFKIWQILNNVTCKRKGIRKKKSSAKSTELDLFNEPSQTIFSLDMECKQLLFEELNLKGDLKSDKVLKLLGYSPQEWEINYNQLEGNRTQKALYEAYLKIVEMEAHDVKDILQIKSTKDDWALEESPLSASEIRERVKAIFQTLGICTKILYFDPLLPVKEFEEQDSYQLWHLLYSYESDDSTSGNETLYRILEKKYAFKREHATILANVTLQDDYGSLSTKAIRKIYPYIKENQYSTACEKAGYKHSKLSLTTEELEARELKNIIPLLKKNALRNPVVEKILNQMINVVNALIEKNSERDAEGKITKYFHFDEIRIELARELKKNAQERYEMTQNINKAKLEHQKISGILQKEFGIKNPTKSDITRYRLYQELAHNGYNDLYTNTYIPKELLFSKNIDIEHIVSKARVFDDSFSNKTLAFREFNIKKGESTAFDYITSLNNEEELNQYLNRVENAYKTKNISPAKYKNLLKKASEIGDGFINRDLRDTQYIAKKAKEILFQVTKNVLSTSGSITDRLREDWGLVDVMKELNMPKYQSLGLTEVEERKEGNKVTVIKNWTKRNDHRHHAMDALTVAFTKPSYIQYLNHLNARKDKNNKNYSVILAIEEKETIKVPTNNGKNKRVFIEPIPNFRQVAKKHLEEIFISHKAKNKVVTKNTNKPAGTDKQQITLTPRGQLHKETVYGKYQYYVNKEEKIGVKFDKETIAKVSNPVYREALLKRLQANDNDPKKAFAGKNALSKNPIYLDEAKTKTLTEKVNLTYLEEDFSIRKDISPDNFKDLKSIEKVIDQGVKRILIKRLQDYDNDPKKAFVDLEKNPIWLNKEKGIAIKRVTISGVNNAQPLHIGKDHLGKTTLNKEGKEIPVDYVSTGNNHHVAIYRDKEGNLQEQIVSFFEAVVGAQQGLPIVDKTYKQAEGWQFLFTMKQNEMFVFPNEATGFNPAEIDLLDPKNKKQISPNLFRVQKIATKDYFFRHHLETNVDTDNVLKNTTWKREGLSGLKDIVKVRINHLGDIVSIGEY

SEQ ID NO: 386 - protein, 1450 aa, Capnocytophaga sp.
MKRILGLDLGSNSIGWAFVEQDFENKQGKIIATGSRIIPMDQGILGDFEKGNTVSQTAERTTYRSMRRLRERHLLRRERLHRVLHILGFLPPHYDAQIDFTKRYGKFIDNAEPKIAYNNGNFIFMNSFNEMIEDFKKYQPQLFYKKSNGEESKIPYDWTIYYLRKKVLSQKITQQELAWLILHFNQKRGYYQLRGEEETENPNKEVAFHSLKVVDVEAEAPNKKGEIWYTIRLENGWIYRRTSKIPLDDWKGKTRDFIVTTDLNDDGTIKVDKEGKEKRSFRAPDENDWNLLKKKTEHDIDFSGKTVGAYIYDHLLQNPNQKIKGKLVRTIERKYYKDELKAILAKQIALQPELFTETLLADCIRELYRKNETQQQNLLSKDFLHLFVEDIIFYQRPLRSKKSTIANCTLEKRSYIDKETNERKDTFIKVCAKSNPYYQEFRVLQWLQNLRIYEIETDREVTAEFIETAEDYEALFNFLMSQKEIDNEGLLKYFLFAKNPQIKDKVAKSELKKWLTTYRWNYVYDAADNSSKKYPMNETGYDLQRYLQKVEGLPANFLTFDITYRLWHLLYSVKDKVEFEKALKKFAQEYQLDEASFVDSFKNFKPYPNEYGSFSEKAIKKLLPLMRFGNHWDFNRIDVSTQKRIDDLINGVANDEIRTIIREKAEKYQLNSESCFQGLPLWLAQYVVYNRHAEATDIEKWTSVSDLETYLEDFKQHSLRNPIVEQVVTETLRVVRDIWQQYGGGQANFFDEIHIELGRELKKTAEERKQLSNRNQENENTNLRIKKLLAELKEDASIQNVRPYSPVQQELLKIYEEGVFSSTDQVEEDIQKIRKKAEPTTPEIQRYKLWLEQKYKSPYTGEVISLTKLFTEEYEIEHIIPQSRYYDDSLSNKVICESAVNKLKTNQLGLEFIQNHHGEKVRITGNKEVTIFTEEQYKEFVKKHYANNSAKQQKLLLNEIPEKMVARQLNDTRYISKYISEILSKIVRSDEKDEGVNSKNVIPCTGKITTALKQDWGLNDVWNELILPRFERMNQLTQTQLFTSYNDRFQKNLPTVPIEYSQGFQKKRIDHRHHAMDALVIACATREHINYMNNQHALDKNKDKKEKQQSRIDLRTILCEKKNNNWQFKKPWSTFTQETKEALEHIVVSFKQNLRVINKATNYYEKWEEKNGVLVKKKVKQEGTNWAIRKPLHKETVSGKIVLDRKIGKDKILTATRKEVDITFTEKIISSITDTGIQKILLNYLNYKGSPEVAFSAEGLEELNKNIAQYNDGKKHQPIYKVRIFEEGSKFPLGETGAKATKFVEAAKGTNLFFGVYQGKEKRSYATIPLNEVIERQKQGLPSVPERNEKGEPLLFSLSPNDLVYVPMEGEIAETIDFNNLSKEQKERIYKTVSFTGNQCFFVQEAVATPIVNKMEYSPLNKMERDILGTMIKEVCIKLKVDRLGNITKA

SEQ ID NO: 387 - protein, 1437 aa, Capnocytophaga sp.
MKYIKYILGLDIGSNSIGWALIQLDLLQKTKRIIATGSRIIPMDQKVLSDFGKGITISPTAQRTSYRNARHCRERHLLRRERLHRVLHILGFLPTHYDKQIDFSKRYGKFVDNTEPKIAYNERKFLFMDSFQEMLADFKIHQPDLFYTKKNGEESKIPYDWTIYYLRKKALSRKISKEELAWIILNFNQKRGYYQLREEEEENKENDFEIISSKIISVIKKDKDKKYNKYWYDIILENGLVYQAAFYNDFVYNWINQDREFIIERISLKNGTEKVKLSYLPTFDEIDKMDKKEQDKYYKKIKIKTENSIGNKTVGCYIYDHILQNPNEKIKGKLVRTIERKYYKEELKAILEKQVALQPELFTDQLFADCIRELYSKNEAQQRNLAARDFVHLFVEDIIFYQRSLRRQKSTLANCSLESRSYIDKDSHTRKEAPLKVCPKSNPYYQEFRVLQWLQNLKIYEIDTDQEVTHEFIKTLEDKQQFFDFLMNQKEIDCEELLKYFLNQTYPNAREKALKSELKKWKDTYRWNYVYDIGEKSSKKYPMNETRYELKRHLEKVANLPDDFLSSEVEYLLWHLIYSVKDKVAYEKGLKTFAQKHHLDKDSFVESFKKFKPYPSEYGSFSEKAIRKLLPLMRFGSYWDFNHIDKNTQKRIEDLITGVENEEIRTILREKAEKYQLEKETDFQDLPLWLAQYIVYNRHAEASSLEKWTSVNDLETYLNEFKQYSLRNPIVEQVVMETLRVVRDIWQQYGQGQASFFDEIHIELGRELKKTAKEREKLSKQNQKNEDINLSIKEKLKELEKYNTRAYSITHQEKYKLWLEQKHISPYTGQIISPENLFTDNYEIEHIIPQSRFFDDSLSNKVVCESIVNKAPYKDRQLGLEFIKNQGGRIVKELSTENKTIKIFTEEQYRTFIKEHYSNNPEKTKKLLLEEIPEKMVARQMNDTCYISKFISEILSKIVRSDEQDEGVHSKNVILCTGKITSALKQDWGVNDVWNDLILPRFERMNDLTQSTLFTTYNEKYQKYLPTVPMEYSNGFQKKRIDHRHHAMDAIIIACATREHINYINNQHALEKGKDKKEKQKEHDKLREKLCIKKDNKGSEENYSWIFKKPWDTFTQEVQAALEGIVVSFKQNLRVINKATNYYERWVEENGKYIKKMVKQEGTNWAIRKPLHEETISGKIYLDREEITKNDILTATRKTVDSSFDEKRIKKITDTGIQKILLNYLKYKGSPEIAFSPEGLEELNKNLSIYNDGKPHKPIYKVRIYEKGSGRFALGEKGRKYKKYVQGAPNLYFGIYQGANKRSFATIPLNEVIERQKQGRPSIPEYNEKGDPLLFSLSPNDLVYVPVEGEIIEDIDFQNLSKEQKERIYNVNDFSSTCYFTPNRIAKAIFPKEVDLQRKGDKLPGSYDTKTASLEGIQIKEVCIKLKIDRLGNISKA

SEQ ID NO: 388 - protein, 1140 aa, Catellicoccus marimammalium
MKNMTKVNVGLDVGISSAGWSVINAETNQILESGVRLFSGSDADENVNRRNQRQGRRLFRRRKLRIQEAKKYLENVFQLKDIEPKDEWNPYEIRVRALNEKVSKEELSIALLNIVKHRGISYELEDVTDEEGTNTQSFQSGLDYNRRLLKTKTVGEIQYDRLQKYGQVRGQIQTEDGLLINIFPTKNYVEEVERILETQKKYHPEIDDVFIEKIISFVTRKREYFVGPGNEKSRTDYGIYRENGETLDNLFEILIGKDKFYPEEYRAAGSSYTAQIFNLLNDLNNLRIPTTEDHHLTKAQKEEIITELKNTSRLSGGMLKLISKVTKAPKEEISGYRKDEKDKPDLHSLAYYRKQKNMLEKEGIQIADFSEELLDELATMMTLNTEPGEIRKQLNKITNQYDILTPEVIEVLVKNHTAFVATSNHKWHRFSLKLMKEFIPELLETSKEQSTILCERGFIQNRASYLDENHHFNYAELRENLYNPVVRKSTCEMLKVFTAIQEKYPNIQNVIVELPRETNEDEQKRKIKKINDNNAKRKKEILKEAQAQSGLSEEALEEKLLKTKGLYLKLMLWYEQEGKCVYSGQEIPLSDLLQNKGGYEVDHIIPISISFDDRLCNKVLVRQQLNSQKSNQTPFEYMTTHTDGHLSFHELKELVGKNKRFSKEKRELLLAEIYSNDIETRKRFINRNLVDTSYTARIVLNALQQYKKENQLSMNVSVVRGAMTNILRKKVKLDKTRETFHHHAIDASLMAVIPNIEFFKERKEWLPKSANEEVVEVEVSEEETMPEKEFKVKMRLPESFIQDVQILQRNSFAKEEVSGPQTRERNLKIKFSHQVDQKMNRKVADDTIYGTRQAQLGKDKKEETYVIGKIKDIYNYDEYVRFKKRYDKNKESFLMYHHDPQTFEKLEEILAQYPEYIEDEKGKKKKVSPFALYREENGPVTKYAKKNNGPVIKQLKYYDSKLNRKIDISHKYSTKNRQVVLQSLKPYRTDVYRNQDTGEYTLVGIDQNDGKFVNGHYGIPKSRYEEIKANNKLSEHDEFVFSLYKNSMVKVIDENGESIVVRYLSRSMPNRKNNAEIKPVEKYQFEDGEVVPVYGKCRKQMQTVFVKKGWTLLKGNTDILGNTYFVEKESENPKKMIDDK

SEQ ID NO: 389 - protein, 1419 aa, Chryseobacterium sp.
MMIKNILGLDLGTNSIGWALIKQNFENKYGEILGMGSRIIPMSQDVLGEFGKGNSVSQTAARTGYRGVRRLRERFLLRRERLHRVLNVLNFLPEHYASQIDFEKRFGKFKYETEPKLAYNNDGFFFKNSFDEMLGDFKDHQFHLLENGRKVPYDWTIYYLRKKALSQKIEKEELAWILLNFNQKRGYYQLRGEDFEEEKDRVFVRLKVDRVVDSGENIKGKILYDVYFENGWKYEKQIVKTEDWIGRTKEFIVTESILKNGDTKRTFKAVDSEKDWIAIKTKTEQEIDKSHKTVGAYIYEALLQNPKQKIKGKLVRTIERKFYREELKKILERQKEFHPELQSDDLYNDCIRELYRNNEAHQITLSKKDFVHLLLNDLIFYQRPLRSQKSSVSNCTLEFRKYKDENGVEHAQYLKTIPKSNPYYQEFRVWQWMFNLNIYRKDDDTNVTKEFLSSTEDYETLFEFLNNRKEVDQKALLRHFKLNEKTHRWNYVEDKKYPCNETKTMISTRLEKVENYPSDFLTREMEQNIWHIIYSVNDKIEYEKALKSFAHKNNLDENSFFEAFKKFPPFKSEYGSFSEKAIKKLLPLLRLGKYWNWESIDRKSQGRIEKIITGEFDGNIKDKVREKAIHLTAENDFQGLQLWLAQYIVYGRHSEASMIGKWNSADDLEEFLKGFKQHSLRNPIVEQVITETLRVVKDIWLKYGNGAKDFFSEIHIELGREMKQTKDERVDATKRITENENTNLRIKALLAEMMNDNSVENIRPYSPMQQEILKIYEDGILKSDIEIDDDILKISKTAQPSSSDLKRYKLWLEQRYKSPYTGQIIPLNKLFTSEYEIEHIIPQSRYFDDSFSNKIICESAVNKLKDNYIGLGFIKQFGGMIVECGFGKSVEIFKAEEYEDFVKKHYANNRSKRNKLLLEEIPEKMIDRQLNDTRHISKYISGVLSNIVRQEDGTDEGVNSKNIVPGNGKITTQLKQDWGLNDVWNELILPRFERMNQLTNSTDFTSWNKNHQKFLPTVPIEFSKGFSKKRIDHRHHAMDALVIACATKDHINLLNNQSAKSDTKRYDLKRKLMKFERVVYSHSKTGEKIEKEVPKQFLKPWDNFTVDAKNKMETIIVSFKQNLRVINKATNHYEKWIEKDGIKRKELIKQEGTNWAIRKPMHKETVSGKVDLPGIKIPKGKILTATRKSLDTSFDLKTINSITDTGIQKILKNYLEFKGSSELAFSPEGIEDMNKNIEKFNDGKPHQSINKVRIFELGSKFSVGQTGNKKDKYVEAAKGTNLFFAVYEDKNGKRSYETIPLNEVIERQKQGLDSVSFKNKEDFLLCPNDLVYVPSEDELENIYNIDFKNLTTEKTGNIYKVVSFSGNQIFFIRQDIAISIVNKAEFSTLNKMERAIDGSMIKENCIKLKIDRLGNIAKI

SEQ ID NO: 390 - protein, 1065 aa, Clostridium perfringens
MNKDINYALGLDIGITSVGWAVINLDLNRIEDLGVRIFNAAENPKDGSSLALPRRLARGRRRLLRRKAYRVERVRKLIVKNNILTKEELEGLFKNKEVIDVWEARVKGLDYKLSREEWAKILINFCKRRGFKSNRKNETKDKEAGQILSSISYNIEKMKETNSRTIGEYIYNEVKNSDDSYAPLRNKFGEYKMCVSRDVLREEIHTLFEKQRELGNNFASDEIEDKYFEIFNSQRPFSNFEDLEKLVGFCTFERKKHKRAPKHCISSEEFTLYEGINKLSIIKDGEKRKLSEEERTLVVNEAFNKKEIKYTTLRKLLGLSEDELFSTLTYSIDKDISKTENTKFVSLKGYHEIKRAIEKGVSKKAWQDIENNRNLLNDIAYVLTLGKTDDEIEKQLRLRNVPEELFESLLDMSFSKFNNLSIYALEKILPFMKEGYQYNEACEKAGYNFKAIYEGVRTKKLPVIEIDEIVNPVVNRALAQTRKVINSVIDKYGSPVRINIELARDLAKNFKDRKLIEKEQKENRANLDKIRENLRELMDKEPTAVEVLKYRLWEQQRGECAYTQSQIALERLFSPGYCEIDHIIPFSRSFDDSLSNKILVLGSENQRKGNKIPYEYFGEDSERWNSFEIWVKGSYLNYKKKANLLKKKFTEEEQRDWKARNLQDTKYICRYISNFVNNRLEFKESENKQKVITVNGRATAYLRSRWGLNKVREDGDKHHALDAAVVGVTTQGMVQKISKYSKAHELYTVRKNDEFVDVETGECVDVDEYKEIRKDILPRPWRGFSEELKLRLSDNPLEELKKLPIETYNEEFIKENVKPIFVSRVPFRKISGKLFKETIYSERAFKDGYFVSKKSLVDLKRGDLDNFYNYECDKKLYDAISERMKEFNYNGKKAFESPFRKPTKSGKEGPVVRSVKIKSAAPFKDGIPMNEGLVAKEGMVRIDIYEKEGKYFVVPVYRYQLAKGIVPKRAAIAGKSELKWPIMDQTYNFKFSIFKNDLIEIKYAKKDGYFGYYDGFDRHTASLVIENHDNSDRYRGIGVKTGVVEFNKYEVDVLGNYHKVNLGGN

SEQ ID NO: 391 - protein, 1099 aa, Corynebacterium accolens
MSLSYRVGIDVGTYSLGCTAIEVDDNDQPVNILSSVSLIHDSGLDPDQQKRAVTRLASSGVARRTRRLYRRRRRRMINLEKFLTSQGWETRPFEHYSDPYLPWNARVALVNGYISDDAQRGMYLSIAFRHIANHRGWRNPYWKVSSLYSPDKPSDAFEQIRKELEESTGHKIPETVTVGQLISFAQFGKDRLRGGGKKKDEKKPQEQVNQAVISARLHQIDHAREINEICRVQKIDDALRKQILDLVFAAESPKGAQIGRVGKDPLQPKLPRALKASDAFQQYRIVALAGNLRIYRDGVSTPLDRDEKLIVFNYLINLSHKEEPSWLKVAEVLNIDRGQLHGTATMTDDGERAGAAPPVHDTNRTILGCKIKPLVHWWEGANDDERAAMLKALSNSEVEDFDSPAGAQTQAFFANLDESEQEKLDSLHLPIGRAAYSEDTLMRLTSRMLDENLDLYEARLAEFDIPKDWAPPAPRIGEPVGNPAVDRVLKGVARWLEAAADEWGAPKSVVIEHVRDGFISKSKANEIDRANNARHKRNRELFKQMQENLGIDGKLRSSDLWRYQSVQRQNCQCAYCGSPITYTTCEMDHIVPRAGEGSTNTRDNLVATCHRCNLAKKNIPFAVWAAQTNIPGVSVKEALDRTRHWSEDSGMTSKDFKKFRKNVCDRLKRTVVDEPLDARSMESVAWMANELRGRVAQRFQEENTVVNVYRGELTAEARRAAGISDKLRFIDGTGKSRLDRRHHAVDAAVVAFTQNYVAETLAIRSNKKREAQLLQAAEQWKEFTGSDAEHRAAWNAWLPKMQKLAVLLQKALDEDRIAVTSNLRLRLGNGRAHEDSIGELKTIRVGDAISVTDIDRASSEALWCALTREPDFDENNGLPENPDRRIRIHGTWYDAEDDIEVFPVGAGAIKVRGGYAELSRFHHARIYKIPGKKAPVYCMLRVYNADLIRHRHEDLFSVEIKPQTMSVRQAEPKLRKALAENTAEYLGWLVTDDELVIDTSNFNTGQIAEMQSELGQVRRWRLDGFYSPSTLRLRPLQMSAEGLREDTSIGAKKIIDRPGWLPAINKLFGEGHVTVVRRDALGRARLTSNAHLPISWKAE

SEQ ID NO: 392 - protein, 1084 aa, Corynebacterium diphtheriae
MKYHVGIDVGTFSVGLAAIEVDDAGMPIKTLSLVSHIHDSGLDPDEIKSAVTRLASSGIARRTRRLYRRKRRRLQQLDKFIQRQGWPVIELEDYSDPLYPWKVRAELAASYIADEKERGEKLSVALRHIARHRGWRNPYAKVSSLYLPDGPSDAFKAIREEIKRASGQPVPETATVGQMVTLCELGTLKLRGEGGVLSARLQQSDHAREIQEICRMQEIGQELYRKIIDVVFAAESPKGSASSRVGKDPLQPGKNRALKASDAFQRYRIAALIGNLRVWVDGEKRILSVEEKNLVFDHLVNLTPKKEPEWVTIAEILGIDRGQLIGTATMTDDGERAGARPPTHDTNRSIVNSRIAPLVDWWKTASALEQHAMVKALSNAEVDDFDSPERAKVQAFFADLDDDVHAKLDSLHLPVGRAAYSEDTLVRLTRRMLSDGVDLYTARLQEFGIEPSWTPPTPRIGEPVGNPAVDRVLKTVSRWLESATKTWGAPERVIIEHVREGFVTEKRAREMDGDMRRRAARNAKLFQEMQEKLNVQGKPSRADLWRYQSVQRQNCQCAYCGSPITFSNSEMDHIVPRAGQGSTNTRENLVAVCHRCNQSKGNTPFAIWAKNTSIEGVSVKEAVERTRHWVTDTGMRSTDFKKFTKAVVERFQRATMDEEIDARSMESVAWMANELRSRVAQHFASHGTTVRVYRGSLTAEARRASGISGKLEFLDGVGKSRLDRRHHAIDAAVIAFTSDYVAETLAVRSNLKQSQAHRQEAPQWREFTGKDAEHRATWRVWCQKMEKLSALLTEDLRDDRVVVMSNVRLRLGNGSAHEETIGKLSKVKLGSQLSVSDIDKASSEALWCALTREPDFDPKDGLPANPERHIRVNGTHVYAGDNIGLFPVSAGSIALRGGYAELGSSFHHARVYKITSGKKPAFAMLRVYTIDLLPYRNQDLFSVELKPQTMSMRQAEKKLRDALATGNAEYLGWLVVDDELVVDTSKIATDQVKAVEAELGTIRRWRVDGFFGDTRLRLRPLQMSKEGIKKESAPELSKIIDRPGWLPAVNKLFSEGNVTVVRRDSLGRVRLESTAHLPVTWKVQ

SEQ ID NO: 393 - protein, 1084 aa, Corynebacterium diphtheriae
MKYHVGIDVGTFSVGLAAIEVDDAGMPIKTLSLVSHIHDSGLDPDEIKSAVTRLASSGIARRTRRLYRRKRRRLQQLDKFIQRQGWPVIELEDYSDPLYPWKVRAELAASYIADEKERGEKLSVALRHIARHRGWRNPYAKVSSLYLPDGPSDAFKAIREEIKRASGQPVPETATVGQMVTLCELGTLKLRGEGGVLSARLQQSDHAREIQEICRMQEIGQELYRKIIDVVFAAESPKGSASSRVGKDPLQPGKNRALKASDAFQRYRIAALIGNLRVRVDGEKRILSVEEKNLVFDHLVNLAPKKEPEWVTIAEILGIDRGQLIGTATMTDDGERAGARPPTHDTNRSIVNSRIAPLVDWWKTASALEQHAMVKALSNAEVDDFDSPEGAKVQAFFADLDDDVHAKLDSLHLPVGRAAYSEDTLVRLTRRMLADGVDLYTARLQEFGIEPSWTPPAPRIGEPVGNPAVDRVLKTVSRWLESATKTWGAPERVIIEHVREGFVTEKRAREMDGDMQRRAARNAKLFQEMQEKLNVQGKPSRADLWRYQSVQRQNCQCAYCGSPITFSNSEMDHIVPRAGQGSTNTRENLVAVCHRCNQSKGNTPFAIWAKNTSIEGVSVKEAVERTRHWVTDTGMRSPDFKKFTKAVVERFQRATMDEEIDARSMESVAWMANELRSRVAQHFASHGTTVRVYRGSLTAEARRASGISGKLKFFDGVGKSRLDRRHHAIDAAVIAFTSDYVAETLAVRSNLKQSQAHRQEAPQWREFTGKDAEHRAAWRVWCQKMEKLSALLTEDLRDDRVVVMSNVRLRLGNGSAHKETIGKLSKVKLGSQLSVSDIDKASSEALWCALTREPDFDPKEGLPANPERHIRVNGTHVYAGDNIGLFPVSAGSIALRGGYAELGSSFHHARVYKITSGKKPAFAMLRVYTIDLLPYRNQDLFSVELKPQTMSMRQAEKKLRDALATGNAEYLGWLVVDDELVVDTSKIATDQVKAVEAELGTIRRWRVDGFFSPSKLRLRPLQMSKEGIKKESAPELSKIIDRPGWLPAVNKLFSDGNVTVVRRDSLGRVRLESTAHLPVTWKVQ

SEQ ID NO: 394 - protein, 1084 aa, Corynebacterium diphtheriae
MKYHVGIDVGTFSVGLAAIEVDDAGMPIKTLSLVSHIHDSGLDPDKIKSAVTRLASSGIARRTRRLYRRKRRRLQQLDKFIQRQGWPVIELEDYSDPLYPWKVRAELAASYIADEKERGEKLSVALRHIARHRGWRNPYAKVSSLYLPDEPSDAFKAIREEIKRASGQPVPETATVGQMVTLCELGTLKLRGEGGVLSARLQQSDHAREIQEICRMQEIGQELYRKIIDVVFAAESPKGSASSRVGKDPLQPGKNRALKASDAFQRYRIAALIGNLRVRVDGEKRILSVEEKNLVFDHLVNLAPKKEPEWVTIAEILGIDRGQLIGTATMTDDGERAGARPPTHDTNRSIVNSRIAPLVDWWKTASALEQHAMVKALSNAEVDDFDSPEGAKVQAFFADLDDDVHAKLDSLHLPVGRAAYSEDTLVRLTRRMLADGVDLYTARLQEFGIEPSWTPPAPRIGEPVGNPAVDRVLKTVSRWLKSATKTWGAPERVIIEHVREGFVTEKRAREMDGDMRRRAARNAKLFQEMQEKLNVQGKPSRADLWRYQSVQRQNCQCAYCGSPITFSNSEMDHIVPRAGQGSTNTRENLVAVCHRCNQSKGNTPFAIWAKNTSIEGVSVKEAVERTRHWVTDTGMRSTDFKKFTKAVVERFQRATMDEEIDARSMESVAWMANELRSRVAQHFASHGTTVRVYRGSLTAEARRASGISGKLEFLDGVGKSRLDRRHHAIDAAVIAFTSDYVAETLAVRSNLKQSQAHRQEAPQWREFTGKDAEHRAAWRVWCQKMEKLSALLTEDLRDDRVVVMSNVRLRLGNGSAHEETIGKLSKVKLGSQLSVSDIDKASSEALWCALTREPDFDPKDGLPANPERHIRVNGTHVYAGDNIGLFPVSAGSIALRGGYAELGSSFHHARVYKITSGKKPAFAMLRVYTIDLLPYRNQDLFSVELKPQTMSMRQAEKKLRDALATGNAEYLGWLVVDDELVVDTSKIATDQVKAVEAELGTIRRWRVDGFFGDTRLRLRPLQMSKEGIKKESAPELSKIIDRPGWLPAVNKLFSEGNVTVVRRDSLGRVRLESTAHLPVTWKVQ

SEQ ID NO: 395 - protein, 1084 aa, Corynebacterium diphtheriae
MKYHVGIDVGTFSVGLAAIEVDDAGMPIKTLSLVSHIHDSGLDPDKIKSAVTRLASSGIARRTRRLYRRKRRRLQQLDKFIQRQGWPVIELEDYSDPLYPWKVRAELAASYIADEKERGEKLSVALRHIARHRGWRNPYAKVSSLYLPDEPSDAFKAIREEIKRASGQPVPETATVGQMVTLCELGTLKLRGEGGVLSARLQQSDHAREIQEICRMQEIGQELYRKIIDVVFAAESPKGSASSRVGKDPLQPGKNRALKASDAFQRYRIAALIGNLRVRVDGEKRILSVEEKNLVFDHLVNLAPKKEPEWVTIAEILGIDRGQLIGTATMTDDGERAGARPPTHDTNRSIVNSRIAPLVDWWKTASALEQHAMVKALSNAEVDDFDSPEGAKVQAFFADLDDDVHAKLDSLHLPVGRAAYSEDTLVRLTRRMLADGVDLYTARLQEFGIEPSWTPPAPRIGEPVGNPAVDRVLKTVSRWLESATKTWGAPERVIIEHVREGFVTEKRAREMDGDMRRRAARNAKLFQEMQEKLNVQGKPSRADLWRYQSVQRQNCQCAYCGSPITFSNSEMDHIVPRAGQGSTNTRENLVAVCHRCNQSKGNTPFAIWAKNTSIEGVSVKEAVERTRHWVTDTGMRSTDFKKFTKAVVERFQRATMDEEIDARSMESVAWMANELRSRVAQHFASHGTTVRVYRGSLTAEARRASGISGKLEFLDGVGKSRLDRRHHAIDAAVIAFTSDYVAETLAVRSNLKQSQAHRQEAPQWREFTGKDAEHRAAWRVWCQKMEKLSALLTEDLRDDRVVVMSNVRLRLGNGSAHEETIGKLSKVKLGSQLSVSDIDKASSEALWCALTREPDFDPKDGLPANPERHIRVNGTHVYAGDNIGLFPVSAGSIALRGGYAELGSSFHHARVYKITSGKKPAFAMLRVYTIDLLPYRNQDLFSVELKPQTMSMRQAEKKLRDALATGNAEYLGWLVVDDELVVDTSKIATDQVKAVEAELGTIRRWRVDGFFGDTRLRLRPLQMSKEGIKKESAPELSKIIDRPGWLPAVNKLFSEGNVTVVRRDSLGRVRLESTAHLPVTWKVQ

SEQ ID NO: 396 - protein, 1084 aa, Corynebacterium diphtheriae
MKYHVGIDVGTFSVGLAAIEVDDAGMPIKTLSLVSHIHDSGLDPDKMKSAVTRLASSGIARRTRRLYRRKRRRLQQLDKFIQRQGWPVIELEDYSDPLYPWKVRAELAASYIADEKERGEKLSVALRHIARHRGWRNPYAKVSSLYLPDEPSDAFKSIREEIKRASGQPVPETATVGQMVTLCELGTLKLRGEGGVLSARLQQSDHAREIQEICRMQEIGQELYRKIIDVVFAAESPKGSASSRVGKDPLQPGKNRALKASDSFQRYRIAALISNLRVRVDGEKRILSVEEKNLVFDHLVNLAPKKEPEWVTIAEILGIDRGQLIGTATMTDDGERAGARPPTHDTNRSIVNSRIAPLVDWWKTASALEQHAMVKALSNAEVDDFDSPEGAKVQAFFADLDDDVHAKLDSLHLPVGRAAYSEDTLVRLTRRMLADGVDLYTARLQEFGIEPSWTPPAPRIGEPVGNPAVDRVLKTVSRWLESATKTWGAPERVIIEHVRDGFVTEKRAREMDGDMRRRAARNAKLFQEMQEKLNVQGKPSRADLWRYQSVQRQNCQCAYCGSPITFSNSEMDHIVPRAGQGSTNTRENLVAVCHRCNQSKGNTPFAIWAKNTSIEGVSVKEAVERTRHWVTDTGMRSTDFKKFTKAVVERFQRATMDEEIDARSMESVAWMANELRSRVAQHFASHGTTVRVYRGSLTAEARRASGISGKLEFLDGVGKSRLDRRHHAIDAAVIAFTSDYVAETLAVRSNLKQSQAHRQEAPQWREFTGKDAEHRAAWRVWCQKMEKLSALLTEDLRDDRVVVMSNVRLRLGNGSAHEETIGKLSKVKLGSQLSVSDIDKASSEALWCALTREPDFDPKDGLPANPERHIRVNGTHVYAGDNIGLFPVSAGSIALRGGYAELGSSFHHARVYKITSGKKPAFAMLRVYTIDLLPYRNQDLFSVELKPQTMSMRQAEKKLRDALATGNAEYLGWLVVDDELVVDTSKIATDQVKAVEAELGTIRRWRVDGFFGDTRLRLRPLQMSKEGIKKELAPELSKIIDRPGWLPAVNKLFSEGNVTVVRRDSLGRVRLESTAHLPVTWKVQ

SEQ ID NO: 397 - protein, 1084 aa, Corynebacterium diphtheriae
MKYHVGIDVGTFSVGLAAIEVDDAGMPIKTLSLVSHIHDSGLDPDKMKSAVTRLASSGIARRTRRLYRRKRRRLQQLDKFIQRQGWPVIELEDYSDPLYPWKVRAELAASYIADEKERGEKLSVALRHIARHRGWRNPYAKVSSLYLPDEPSDAFKSIREEIKRASGQPVPETATVGQMVTLCELGTLKLRGEGGVLSARLQQSDHAREIQEICRMQEIGQELYRKIIDVVFAAESPKGSASSRVGKDPLQPGKNRALKASDAFQRYRIAALIGNLRVRVDGEKRILSVEEKNLVFDHLVNLAPKKEPEWVTIAEILGIDRGQLIGTATMTDDGERAGARPPTHDTNRSIVNSRIAPLVDWWKTASALEQHAMVKALSNAEVDDFDSPEGAKVQAFFADLDDDVHAKLDSLHLPVGRAAYSEDTLVRLTRRMLADGVDLYTARLQEFGIEPSWTPPAPRIGEPVGNPAVDRVLKTVSRWLESATKTWGAPERVIIEHVREGFVTEKRAREMDGDMRRRAARNAKLFQEMQEKLNVQGKPSRADLWRYQSVQRQNCQCAYCGSPITFSNSEMDHIVPRAGQGSTNTRENLVAVCHRCNQSKGNTPFAIWAKNTSIEGVSVKEAVERTRHWVTDTGMRSTDFKKFTKAVVERFQRATMDEEIDARSMESVAWMANELRSRVAQHFASHGTTVRVYRGSLTAEARRASGISGKLEFLDGVGKSRLDRRHHAIDAAVIAFTSDYVAETLAVRSNLKQSQAHRQEAPQWREFTGKDAEHRAAWRVWCQKMEKLSALLTEDLRDDRVVVMSNVRLRLGNGSAHEETIGKLSKVKLGSQLSVSDIDKASSEALWCALTREPDFDPKDGLPANPERHIRVNGTHVYAGDNIGLFPVSAGSIALRGGYAELGSSFHHARVYKITSGKKPAFAMLRVYTIDLLPYRNQDLFSVELKPQTMSMRQAEKKLRDALATGNAEYLGWLVVDDELVVDTSKIATDQVKAVEAELGTIRRWRVDGFFGDTRLRLRPLQMSKEGIKKESAPELSKIIDRPGWLPAVNKLFSEGNVTVVRRDSLGRVRLESTAHLPVTWKVQ

SEQ ID NO: 398 - protein, 1084 aa, Corynebacterium diphtheriae
MKYHVGIDVGTFSVGLAAIEVDDAGMPIKTLSLVSHIHDSRLDPDKIKSAVTRLASSGIARRTRRLYRRKRRRLQQLDKFIQRQGWPVIELEDYSDPLYPWKVRAELAASYIADEKERGEKLSVALRHIARHRGWRNPYAKVSSLYLPDEPSDAFKAIREEIKRASGQPVPETATVGQMVTLCELGTLKLRGEGGVLSARLQQSDHAREIQEICRMQEIGQELYRKIIDVVFAAESPKGSASSRVGKDPLQPGKNRALKASDAFQRYRIAALIGNLRVRVDGEKRILSVEEKNLVFDHLVNLAPKKEPEWVTIAEILGIDRGQLIGTATMTDDGERAGARPPTHDTNRSIVNSRIAPLVDWWKTASALEQHAMVKALSNAEVDDFDSPEGAKVQAFFADLDDDVHAKLDSLHLPVGRAAYSEDTLVRLTRRMLADGVDLYTARLQEFGIEPSWTPPAPRIGEPVGNPAVDRVLKTVSRWLESATKTWGAPERVIIEHVREGFVTEKRAREMDGDMRRRAARNAKLFQEMQEKLNIQGKPSRADLWRYQSVQRQNCQCAYCGSPITFSNSEMDHIVPRAGQGSTNTRENLVAVCHRCNQSKGNTPFAIWAKNTSIEGVSVKEAVERTRHWVTDTGMRSTDFKKFTKAVVERFQRVTMDEEIDARSMESVAWMANELRSRVAQHFASRGTTVRVYRGSLTAEARRASGISGKLEFLDGVGKSRLDRRHHAIDAAVIAFTSDYVAETLAVRSNLKQSQAHRQEAPQWREFTGKDAEHRAAWRVWCQKMEKLSALLTEDLRDDRVVVMSNVRLRLGNGSAHEETIGKLSKVKLGSQLSVSDIDKASSEALWCALTREPDFDPKDGLPANPERHIRVNGTHVYAGDNIGLFPVSAGSIALRGGYAELGSSFHHARVYKITSGKKPAFAMLRVYTIDLLPYRNQDLFSVELKPQTMSMRQAEKKLRDALATGNAEYLGWLVVDDELVVDTSKIATDQVKAVEAELGTIRRWRVDGFFGDTRLRLRPLQMSKEGIKKESAPELSKIIDRPGWLPAVNKLFSEGNVTVVRRDSLGRVRLESTAHLPVTWKVQ

SEQ ID NO: 399 - protein, 1069 aa, Corynebacterium matruchotii
MAAIAIDDDGKPTEILSAISLIHDSGVDPDSAKSAATRLATSGIARRTRRLYRRKRKRLAKLDKFISSQGWPLKEFEKYEDPFYPWRVRAELATTAITDQQELGEKLSIALRHIARHRGWRNPYSKVTALYTVTEPSDAFLAMQEECAKQLGRTIPETITVGQLVTGMNLGKTRLRGENSLLAARPRQSDNANEIHTIAKVQGLSNELVRQIIDHVFAAESPKGSAAEQVGKDPLQPTKKRALKASDAFQQYRIAALIGNLRIRGGKGNRRLTTEETRLVFDYLRSLPAKQEPTWQLVAEQLKIDRGNLVGTAIMTDDGERAGAKPPVHDTNRIMENTKIKPLATWWKSADADARAAMVKALSNAEVDDFDSQAGAQVQEFFFGISDEDQEKLDGLHLPIGRAAYSEDTLDRLTKRMIGEGMDLYEARQAEFKISNDWAPPAPEIGERVGNPAVDRVLKATARWLNAAERQWGAPKSVNIEHVRAAFMSESSARELDRDNQQRAKRNVKVVAEMQEKLGIEGRPSRADVWRFQSIQRQNGKCAYCGAEISFKNSEMDHIIPQVGEGSTNTRDNLVAVCRECNSSKSNIAFAVWAENTSRPGVSVQKAIERTHHWVTDSGLRKPEFDKFRKQVCDRLRRKATDEPIDARSLESVAWMANELRSRIAQKFKDGDTKVRVYKGALTAEARRASGISGKLEFVDGKGKSRLDRRHHAVDAAVVAFTSNYVAETLALRSNMKFDQELRRKAPQWREFTGSDHVHQVEWTKWKYRMQALAELLNNALVQDRIVVMHNLRLRLGNGAAHEDTIGKLTRLKVGDAISTTDIDRASSEALWCALTRDPDYDPKTGLPENPNRTIRIHGTHLTASDEITVFPVAAASIPIRDGFAKLGSNYHHVRLFRVPSGKKYKYCLMQVYTVDLLKFRKEDLFTVELKPQTISVRTCEALLRKALANGTAEYLGWLVSDDELLIDTSSFDTPGIVKLREEYGPVNRWRLAGLTSVTRLNLRPLYLSKEGLKPNVNPEIKKIIDNRSWIITVNKLFSSGHVKIIRRDALGRPRLHSAAHLPICWEVK

SEQ ID NO: 400 - protein, 210 aa, Diplosphaera colitermitum
MSDILDKPIVLSLNRAWQVIGHRTVKQALVALNGGNADLPPALGLDIAYPKFDDGAWNFDRPLFLNPLPWSEWIELPVRDFDFAITTPRLRIRVPTVIVATQFAKMPVRIPRLTREAIFERDGGVCQYTGEHVGKHGGNLDHVVPRDRGGRDSFENLVWAKREINSLKANRLPHEAGLRLLRRPKAPAPLPASMTIREARHPDWRHFLTP

SEQ ID NO: 401 - protein, 1332 aa, Dolosigranulum pigrum
MQKNYTIGLDIGTNSVGWAVMKDDYTLIRKRMKVLGNTDIKKIKKNFWGVRLFDEGETAKETRLKRGTRRRYQRRRNRLIYLQDIFQQPMLAIDENFFHRLDDSFFVPDDKSYDRHPIFGSLEEEVAYHNTYPTIYHLRKHLADNPEKADLRLVYTALAHIVKYRGHFLIEGELNTENTSISETFEQFLDTYSDIFKEQLVGDISKVEEILSSKQSRSRKHEQIMALFPNENKLGNFGRFMMLIVGNTSNFKPVFDLDDEYKLKLSDETYEEDLDTLLGMTDDVFLDVFMAAKNVYDAVEMSAIISTDTGNSKAVLSNQMINFYDEHKVDLAQLKQFFKTHLPDKYYECFSDPSKNGYAGYIDGKTNQEDFYKYIEKVMKTIKSDKKDYFLDKIDREVFLRKQRSFYNSVIPHQIHLQEMQAILDRQSQYYPFLAENRDKIESLVTFRIPYYVGPLTVSDQSEFAWMERQSDEPIRPWNFDEIVNKERSAEKFIERMTNMDTYLLEEKVLPKRSLLYQTFEVYNELTKVRYTNEQGKTEKLNRQQKAEIIETLFKQKNRVREKDIANYLEQYGYVDGTDIKGVEDKFNASLSTYNDLAKIDGAKAYLDDPEYADVWEDIIKILTIFEDKAMRKKQLQTYSDTLSPEILKKLERKHYTGWGRFSKKLINGLRDEGSNKTILDYLKSDEGSSGPTNRNFMQLIRDNTLSFKKKIEDAQTIEDTTHIYDTVAELPGSPAIKKGIRQALKIVEEIIDIIGYEPENIVVEMARESQTTKKGKDLSKERLEKLTEAIKEFDGPSDVKVKDLKNENLRNDRLYLYYLQNGRDMYTNEPLDINNLSKYDIDHIIPQSFTTDNSIDNKVLVSRTKNQGNKSDDVPSINIVHKMKPFWRQLHKAGLISDRKFKNLTKAEHGGLTEADRAHFLNRQLVETRQITKHVANLLDSQYNTAEEQRINIVLLKSSMTSRFRKEFKLYKVREINDYHHGHDAYLNAVVATTIMKVYPNLKPQFVYGQYKKTSMFKEEKATARKHFYSNITKFFKKEKVVNEETGEILWDTERHLSTIKRVLSWKQMNIVKKVEKQKGQLWKETIYPKGDSSKLIPVKEGMDPQKYGGLSQVSEAFAVVITHEKGKKKQLKSDLISIPIVDQKAYEQHPTAYLEEAGYNNPTVLHELFKYQLFELEDGSRRMIASAKEFQKGNQMVLPLELVELLYHANRYDKVKFPDSIEYVHDNLAKFDDLLEYVIDFSNKYINADKNVQKIQKIYKEHGTEDVELTVESFVNLMTFTAMGAPATFKFYGESITRSRYTSITEFRGSTLIFQSITGLYETRYKLEDN

SEQ ID NO: 402 - protein, 921 aa, Enterococcus faecalis
MIPHQIHLAELQAIIHRQAAYYPFLKENQEKIEQLVTFRIPYYVGPLSKGDASTFAWLKRQSEEPIRPWNLQETVDLDQSATAFIERMTNFDTYLPSEKVLPKHSLLYEKFMVFNELTKISYTDDRGIKANFSGKEKEKIFDYLFKTRRKVKKKDIIQFYRNEYNTEIVTLSGLEEDQFNASFSTYQDLLKCGLTRAELDHPDNAEKLEDIIKILTIFEDRQRIRTQLSTFKGQFSAEVLKKLERKHYTGWGRLSKKLINGIYDKESGKTILGYLIKDDGVSKHYNRNFMQLINDSQLSFKNAIQKAQSSEHEETLSETVNELAGSPAIKKGIYQSLKIVDELVAIMGYAPKRIVVEMARENQTTSTGKRRSIQRLKIVEKAMAEIGSNLLKEQPTTNEQLRDTRLFLYYMQNGKDMYTGDELSLHRLSHYDIDHIIPQSFMKDDSLDNLVLVGSTENRGKSDDVPSKEVVKDMKAYWEKLYAAGLISQRKFQRLTKGEQGGLTLEDKAHFIQRQLVETRQITKNVAGILDQRYNANSKEKKVQIITLKASLTSQFRSIFGLYKVREVNDYHHGQDAYLNCVVATTLLKVYPNLAPEFVYGEYPKFQTFKENKATAKAIIYTNLLRFFTEDEPRFTKDGEILWSNSYLKTIKKELNYHQMNIVKKVEVQKGGFSKESIKPKGPSNKLIPVKNGLDPQKYGGFDSPIVAYTVLFTHEKGKKPLIKQEILGITIMEKTRFEQNRILFLEEKGFLRPRVLMKLPKYTLYEFPEGRRRLLASAKEAQKGNQMVLPEHLLTLLYHAKQCLLPNQSESLTYVEQHQPEFQEILERVVDFAEVHTLAKSKVQQIVKLFEANQTADVKEIAASFIQLMQFNAMGAPSTFKFFQKDIERARYTSIKEIFDATIIYQSTTGLYETRRKVVD

SEQ ID NO: 403 - protein, 1337 aa, Enterococcus faecalis; identical to SEQ ID NO: 115

SEQ ID NO: 404 - protein, 1337 aa, Enterococcus faecalis
MKKDYVIGLDIGTNSVGWAVMTEDYQLVKKKMPIYGNTEKKKIKKNFWGVRLFEEGHTAEDRRLKRTARRRISRRRNRLRYLQAFFEEAMTALDENFFARLQESFLVPEDKKWHRHPIFAKLEDEVAYHETYPTIYHLRKKLADSSEQADLRLIYLALAHIVKYRGHFLIEGKLSTENISVKEQFQQFMIIYNQTFVNGESRLVSAPLPESVLIEEELTEKASRTKKSEKVLQQFPQEKANGLFGQFLKLMVGNKADFKKVFGLEEEAKITYASESYEEDLEGILAKVGDEYSDVFLAAKNVYDAVELSTILADSDKKSHAKLSSSMIVRFTEHQEDLKNFKRFIRENCPDEYDNLFKNEQKDGYAGYITHAGKVSQLKFYQYVKKIIQDIAGAEYFLEKIAQENFLRKQRTFDNGVIPHQIHLAELQAIIHRQAAYYPFLKENQEKIEQLVTFRIPYYVGPLSKGDANTFAWLKRQSEEPIRPWNLQETVDLDQSATAFIERMTNFDTYLPSEKVLPKHSLLYEKFMVFNELTKISYTDDRGIKANFSGKEKEKIFDYLFKTRRKVKKKDIIQFYRNEYNTEIVTLSGLEEDQFNASFSTYQDLLKCGLTRAELDHPDNAEKLEDIIKILTIFEDRQRIRTQLSTFKGQFSAEVLKKLERKHYTGWGRLSKKLINGIYDKESGKTILDYLIKDDGVSKHYNRNFMQLINDSQLSFKNAIQKAQSSEHEETLSETVNELAGSPAIKKGIYQSLKIVDELVAIMGYAPKRIVVEMARENQTTSTGKRRSIQRLKIVEKAMAEIGSNLLKEQPTTNEQLRDTRLFLYYMQNGKDMYTGDELSLHRLSHYDIDHIIPQSFMKDDSLDNLVLVGSTENRGKSDDVPSKEVVKDMKAYWEKLYAAGLISQRKFQRLTKGEQGGLTLEDKAHFIQRQLVETRQITKNVAGILDQRYNAKSKEKKVQIITLKASLTSQFRSIFGLYKVREVNDYHHGQDAYLNCVVATTLLKVYPNLAPEFVYGEYPKFQTFKENKATAKAIIYTNLLRFFTEDEPRFTKDGEILWSNSYLKTIKKELNYHQMNIVKKVEVQKGGFSKESIKPKGPSNKLIPVKNGLDPQKYGGFDSPIVAYTVLFTHEKGKKPLIKQEILGITIMEKTRFEQNPILFLEEKGFLRPRVLMKLPKYTLYQFPEGRRRLLASAKEAQKGNQMVLPEHLLTLLYHAKQCLLPNQSESLAYVEQHQPEFQEILERVVDFAEVHTLAKSKVQQIVKLFEANQTADVKEIAASFIQLMQFNAMGAPSTFKFFQKDIERARYTSIKEIFDATIIYQSTTGLYETRRKVVD

SEQ ID NO: 405 - protein, 1337 aa, Enterococcus faecalis
MKKDYVIGLDIGTNSVGWAVMTEDYQLVKKKMPIYGNTEKKKIKKNFWGVRLFEEGHTAEDRRLKRTARRRISRRRNRLRYLQAFFEEAMTALDENFFARLQESFLVPEDKKWHRHPIFAKLEDEVAYHETYPTIYHLRKKLADSSEQADLRLIYLALAHIVKYRGHFLIEGKLSTENISVKEQFQQFMIIYNQTFVNGESRLVSTPLPESVLIEEELTEKASRTKKSEKVLQQFPQEKANGLFGQFLKLMVGNKADFKKVFGLEEEAKITYASESYEEDLEGILAKVGDEYSDVFLAAKNVYDAVELSTILADSDKKSHAKLSSSMIVRFTEHQEDLKNFKRFIRENCPDEYDNLFKNEQKDGYAGYITHAGKVSQLKFYQYVKKIIQDIAGAEYFLEKIAQENFLRKQRTFDNGVIPHQIHLAELQAIIHRQAAYYPFLKENQEKIEQLVTFRIPYYVGPLSKGDASTFAWLKRQSEEPIRPWNLQETVDLDQSATAFIERMTNFDTYLPSEKVLPKHSLLYEKFMVFNELTKISYTDDRGIKANFSGKEKEKIFDYLFKTRRKVKKKDIIQFYRNEYNTEIVTLSGLEEDQFNASFSTYQDLLKCGLTRAELDHPDNAEKLEDIIKILTIFEDRQRIRTQLSTFKGQFSAEVLKKLERKHYTGWGRLSKKLINGIYDKESGKTILDYLVKDDGVSKHYNRNFMQLINDSQLSFKNAIQKAQSSEHEETLSETVNELAGSPAIKKGIYQSLKIVDELVAIMGYAPKRIVVEMARENQTTSTGKRRSIQRLKIVEKAMAEIGSNLLKEQPTTNEQLRDTRLFLYYMQNGKDMYTGDELSLHRLSHYDIDHIIPQSFMKDDSLDNLVLVGSTENRGKSDDVPSKEVVKDMKAYWEKLYAAGLISQRKFQRLTKGEQGGLTLEDKAHFIQRQLVETRQITKNVAGILDQRYNAKSKEKKVQIITLKASLTSQFRSIFGLYKVREVNDYHHGQDAYLNCVVATTLLKVYPNLAPEFVYGEYPKFQTFKENKATAKAIIYTNLLRFFTEDEPRFTKDGEILWSNSYLKTIKKELNYHQMNIVKKVEVQKGGFSKESIKPKGPSNKLIPVKNGLDPQKYGGFDSPIVAYTVLFTHEKGKKPLIKQEILGITIMEKTRFEQNPILFLEEKGFLRPRVLMKLPKYTLYEFPEGRRRLLASAKEAQKGNQMVLPEHLLTLLYHAKQCLLPNQSESLAYVEQHQPEFQEILERVVDFAEVHTLAKSKVQQIVKLFEANQTADVKEIAASFIQLMQFNAMGAPSTFKFFQKDIERARYTSIKEIFDATIIYQSTTGLYETRRKVVD

SEQ ID NO: 406 - protein, 1337 aa, Enterococcus faecalis
MKKDYVIGLDIGTNSVGWAVMTEDYQLVKKKMPIYGNTEKKKIKKNFWGVRLFEEGHTAEDRRLKRTARRRISRRRNRLRYLQAFFEEAMTDLDENFFARLQESFLVPEDKKWHRHPIFAKLEDEVAYHETYPTIYHLRKKLADSSEQADLRLIYLALAHIVKYRGHFLIEGKLSTENISVKEQFQQFMIIYNQTFVNGESRLVSAPLPESVLIEEELTEKASRTKKSEKVLQQFPQEKANGLFGQFLKLMVGNKADFKKVFGLEEEAKITYASESYEEDLEGILAKVGDEYSDVFLAAKNVYDAVELSTILADSDKKSHAKLSSSMIVRFTEHQEDLKKFKRFIRENCPDEYDNLFKNEQKDGYAGYIAHAGKVSQLKFYQYVKKIIQDIAGAEYFLEKIAQENFLRKQRTFDNGVIPHQIHLAELQAIIHRQAAYYPFLKENQEKIEQLVTFRIPYYVGPLSKGDASTFAWLKRQSEEPIRPWNLQETVDLDQSATAFIERMTNFDTYLPSEKVLPKHSLLYEKFMVFNELTKISYTDDRGIKANFSGKEKEKIFDYLFKTRRKVKKKDIIQFYRNEYNTEIVTLSGLEEDQFNASFSTYQDLLKCGLTRAELDHPDNAEKLEDIIKILTIFEDRQRIRTQLSTFKGQFSAEVLKKLERKHYTGWGRLSKKLINGIYDKESGKTILGYLIKDDGVSKHYNRNFMQLINDSQLSFKNAIQKAQSSEHEETLSETVNELAGSPAIKKGIYQSLKIVDELVAIMGYAPKRIVVEMARENQTTSTGKRRSIQRLKIVEKAMAEIGSNLLKEQPTTNEQLRDTRLFLYYMQNGKDMYTGDELSLHRLSHYDIDHIIPQSFMKDDSLDNLVLVGSTENRGKSDDVPSKEVVKDMKAYWEKLYAAGLISQRKFQRLTKGEQGGLTLEDKAHFIQRQLVETRQITKNVAGILDQRYNANSKEKKVQIITLKASLTSQFRSIFGLYKVREVNDYHHGQDAYLNCVVATTLLKVYPNLAPEFVYGEYPKFQTFKENKATAKAIIYTNLLRFFTEDEPRFTKDGEILWSNSYLKTIKKELNYHQMNIVKKVEVQKGGFSKESIKPKGPSNKLIPVKNGLDPQKYGGFDSPIVAYTVLFTHEKGKKPLIKQEILGITIMEKTRFEQNPILFLEEKGFLRPRVLMKLPKYTLYEFPEGRRRLLASAKEAQKGNQMVLPEHLLTLLYHAKQCLLPNQSESLAYVEQHQPEFQEILERVVDFAEVHTLAKSKVQQIVKLFEANQTADVKEIAASFIQLMQFNAMGAPSTFKFFQKDIERARYTSIKEIFDATIIYQSTTGLYETRRKVVD

SEQ ID NO: 407 - protein, 936 aa, Enterococcus faecalis
MKKDYVIGLDIGTNSVGWAVMTEDYQLVKKKMPIYGNTEKKKIKKNFWGVRLFEEGHTAEDRRLKRTARRRISRRRNRLRYLQAFFEEAMTDLDENFFARLQESFLVPEDKKWHRHPIFAKLEDEVAYHETYPTIYHLRKKLADSSEQADLRLIYLALAHIVKYRGHFLIEGKLSTENISVKEQFQQFMIIYNQTFVNGESRLVSAPLPESVLIEEELTEKASRTKKSEKVLQQFPQEKANGLFGQFLKLMVGNKADFKKVFGLEEEAKITYASESYEEDLEGILAKVGDEYSDVFLAAKNVYDAVELSTILADSDKKSHAKLSSSMIVRFTEHQEDLKKFKRFIRENCPDEYDNLFKNEQKDGYAGYIAHAGKVSQLKFYQYVKKIIQDIAGAEYFLEKIAQENFLRKQRTFDNGVIPHQIHLAELQAIIHRQAAYYPFLKENQEKIEQLVTFRIPYYVGPLSKGDASTFAWLKRQSEEPIRPWNLQETVDLDQSATAFIERMTNFDTYLPSEKVLPKHSLLYEKFMVFNELTKISYTDDRGIKANFSGKEKEKIFDYLFKTRRKVKKKDIIQFYRNEYNTEIVTLSGLEEDQFNASFSTYQDLLKCGLTRAELDHPDNAEKLEDIIKILTIFEDRQRIRTQLSTFKGQFSAEVLKKLERKHYTGWGRLSKKLINGIYDKESGKTILGYLIKDDGVSKHYNRNFMQLINDSQLSFKNAIQKAQSSEHEETLSETVNELAGSPAIKKGIYQSLKIVDELVAIMGYAPKRIVVEMARENQTTSTGKRRSIQRLKIVEKAMAEIGSNLLKEQPTTNEQLRDTRLFLYYMQNGKDMYTGDELSLHRLSHYDIDHIIPQSFMKDDSLDNLVLVGSTENRGKSDDVPSKEVVKDMKAYWEKLYAAGLISQRKFQRLTKGEQGGLTLEDKAHFIQRQLVETR

SEQ ID NO: 408 - protein, 1337 aa, Enterococcus faecalis
MKKDYVIGLDIGTNSVGWAVMTEDYQLVKKKMPIYGNTEKKKIKKNFWGVRLFEEGHTAEDRRLKRTARRRISRRRNRLRYLQAFFEEAMTDLDENFFARLQESFLVPEDKKWHRHPIFAKLEDEVAYHETYPTIYHLRKKLADSSEQADLRLIYLALAHIVKYRGHFLIEGKLSTENISVKEQFQQFMIIYNQTFVNGESRLVSAPLPESVLIEEELTEKASRTKKSEKVLQQFPQEKANGLFGQFLKLMVGNKADFKKVFGLEEEAKITYASESYEEDLEGILAKVGDEYSDVFLAAKNVYDAVELSTILADSDKKSHAKLSSSMIVRFTEHQEDLKKFKRFIRENCPDEYDNLFKNEQKDGYAGYIAHAGKVSQLKFYQYVKKIIQDIAGAEYFLEKIAQENFLRKQRTFDNGVIPHQIHLAELQAIIHRQAAYYPFLKENQEKIEQLVTFRIPYYVGPLSKGDASTFAWLKRQSEEPIRPWNLQETVDLDQSATAFIERMTNFDTYLPSEKVLPKHSLLYEKFMVFNELTKISYTDDRGIKANFSGKEKEKIFDYLFKTRRKVKKKDIIQFYRNEYNTEIVTLSGLEEDQFNASFSTYQDLLKCGLTRAELDHPDNAEKLEDIIKILTIFEDRQRIRTQLSTFKGQFSAEVLKKLERKHYTGWGRLSKKLINGIYDKESGKTILDYLVKDDGVSKHYNRNFMQLINDSQLSFKNAIQKAQSSEHEETLSETVNELAGSPAIKKGIYQSLKIVDELVAIMGYAPKRIVVEMARENQTTSTGKRRSIQRLKIVEKAMAEIGSNLLKEQPTTNEQLRDTRLFLYYMQNGKDMYTGDELSLHRLSHYDIDHIIPQSFMKDDSLDNLVLVGSTENRGKSDDVPSKEVVKDMKAYWEKLYAAGLISQRKFQRLTKGEQGGLTLEDKAHFIQRQLVETRQITKNVAGILNQRYNANSKEKKVQIITLKASLTSQFRSIFGLYKVREVNDYHHGQDAYLNCVVATTLLKVYPNLAPEFVYGEYPKFQTFKENKATAKAIIYTNLLRFFTEDEPRFTKDGEILWSNSYLKTIKKELNYHQMNIVKKVEVQKGGFSKESIKPKGPSNKLIPVKNGLDPQKYGGFDSPVVAYTVLFTHEKGKKPLIKQEILGITIMEKTRFEQNPILFLEEKGFLRPRVLMKLPKYTLYEFPEGRRRLLASAKEAQKGNQMVLPEHLLTLLYHAKQCLLPNQSESLAYVEQHQPEFQEILERVVDFAEVHTLAKSKVQQIVKLFEANQTADVKEIAASFIQLMQFNAMGAPSTFKFFQKDIERARYTSIKEIFDATIIYQSTTGLYETRRKVVD

SEQ ID NO: 409 - protein, 1337 aa, Enterococcus faecalis
MKKDYVIGLDIGTNSVGWAVMTEDYQLVKKKMPIYGNTEKKKIKKNFWGVRLFEEGHTAEDRRLKRTARRRISRRRNRLRYLQAFFEEAMTDLDENFFARLQESFLVPEDKKWHRHPIFAKLEDEVAYHETYPTIYHLRKKLADSSEQADLRLIYLALAHIVKYRGHFLIEGKLSTENISVKEQFQQFMIIYNQTFVNGESRLVSAPLPESVLIEEELTEKASRTKKSEKVLQQFPQEKANGLFGQFLKLMVGNKADFKKVFGLEEEAKITYASESYEEDLEGILAKVGDEYSDVFLAAKNVYDAVELSTILADSDKKSHAKLSSSMIVRFTEHQEDLKKFKRFIRENCPDEYDNLFKNEQKDGYAGYIAHAGKVSQLKFYQYVKKIIQDIAGAEYFLEKIAQENFLRKQRTFDNGVIPHQIHLAELQAIIHRQAAYYPFLKENQEKIEQLVTFRIPYYVGPLSKGDASTFAWLKRQSEEPIRPWNLQETVDLDQSATAFIERMTNFDTYLPSEKVLPKHSLLYEKFMVFNELTKISYTDDRGIKANFSGKEKEKIFDYLFKTRRKVKKKDIIQFYRNEYNTEIVTLSGLEEDQFNASFSTYQDLLKCGLTRAELDHPDNAEKLEDIIKILTIFEDRQRIRTQLSTFKGQFSAEVLKKLERKHYTGWGRLSKKLINGIYDKESGKTILGYLIKDDGVSKHYNRNFMQLINDSQLSFKNAIQKAQSSEHEETLSETVNELAGSPAIKKGIYQSLKIVDELVAIMGYAPKRIVVEMARENQTTSTGKRRSIQRLKIVEKAMAEIGSNLLKEQPTTNEQLRDTRLFLYYMQNGKDMYTGDELSLHRLSHYDIDHIIPQSFMKDDSLDNLVLVGSTENLGKSDDVPSKEVVKDMKAYWEKLYAAGLISQRKFQRLTKGEQGGLTLEDKAHFIQRQLVETRQITKNVAGILDQRYNANSKEKKVQIITLKASLTSQFRSIFGLYKVREVNDYHHGQDAYLNCVVATTLLKVYPNLAPEFVYGEYPKFQTFKENKATAKAIIYTNLLRFFTEDEPRFTKDGEILWSNSYLKTIKKELNYHQMNIVKKVEVQKGGFSKESIKPKGPSNKLIPVKNGLDPQKYGGFDSPIVAYTVLFTHEKGKKPLIKQEILGITIMEKTRFEQNPILFLEEKGFLRPRVLMKLPKYTLYEFPEGRRRLLASAKEAQKGNQMVLPEHLLTLLYHAKQCLLPNQSESLAYVEQHQPEFQEILERVVDFAEVHTLAKSKVQQIVKLFEANQTADVKEIAASFIQLMQFNAMGAPSTFKFFQKDIERARYTSIKEIFDATIIYQSTTGLYETRRKVVD

SEQ ID NO: 410 - protein, 1337 aa, Enterococcus faecalis
MKKDYVIGLDIGTNSVGWAVMTEDYQLVKKKMPIYGNTEKKKIKKNFWGVRLFEEGHTAEDRRLKRTARRRISRRRNRLRYLQAFFEEAMTDLDENFFARLQESFLVPEDKKWHRHPIFAKLEDEVAYHETYPTIYHLRKKLADSSEQADLRLIYLALAHIVKYRGHFLIEGKLSTENTSVKEQFQQFMVIYNQTFVNGESRLVSAPLPESVLIEEELTEKASRTKKSEKVLQQFPQEKANGLFGQFLKLMVGNKADFKKVFGLEEEAKITYASESYEEDLEGILAKVGDEYSDVFLAAKNVYDAVELSTILADSDKKSHAKLSSSMIVRFTEHQEDLKKFKRFIRENCPDEYDNLFKNEQKDGYAGYIAHAGKVSQLKFYQYVKKIIQDIAGAEYFLEKIAQENFLRKQRTFDNGVIPHQIHLAELQAIIHRQAAYYPFLKENQEKIEQLVTFRIPYYVGPLSKGDASTFAWLKRQSEEPIRPWNLQETVDLDQSATAFIERMTNFDTYLPSEKVLPKHSLLYEKFMVFNELTKISYTDDRGIKANFSGKEKEKIFDYLFKTRRKVKKKDIIQFYRNEYNTEIVTLSGLEEDQFNASFSTYQDLLKCGLTRAELDHPDNAEKLEDIIKILTIFEDRQRIRTQLSTFKGQFSAEVLKKLERKHYTGWGRLSKKLINGIYDKESGKTILDYLVKDDGVSKHYNRNFMQLINDSQLSFKNAIQKAQSSEHEETLSETVNELAGSPAIKKGIYQSLKIVDELVAIMGYAPKRIVVEMARENQTTSTGKRRSIQRLKIVEKAMAEIGSNLLKEQPTTNEQLRDTRLFLYYMQNGKDMYTGDELSLHRLSHYDIDHIIPQSFMKDDSLDNLVLVGSTENRGKSDDVPSKKVVKKMKAYWEKLYAAGLISQRKFQRLTKGEQGGLTLEDKAHFIQRQLVETRQITKNVAGILDQRYNAKSKEKKVQIITLKASLTSQFRSIFGLYKVREVNDYHHGQDAYLNCVVATTLLKVYPNLAPEFVYGEYPKFQAFKENKATAKTIIYTNLMRFFTEDEPRFTKDSEILWSNSYLKTIKKELNYHQMNIVKKVEVQKGGFSKESIKPKGPSNKLIPVKNGLDPQKYGGFDSPVVAYTVLFTHEKGKKPLIKQEILGITIMEKTRFEQNPILFLEEKGFLRPRVLMKLPKYTLYEFPEGRRRLLASAKEAQKGNQMVLPEHLLTLLYHAKQCLLPNQSESLAYVEQHQPEFQEILERVVDFAEVHTLAKSKVQQIVKLFEANQTADVKEIAASFIQLMQFNAMGAPSTFKFFQKDIERARYTSIKEIFDATIIYQSTTGLYETRRKVVD

SEQ ID NO: 411 - protein, 1150 aa, Enterococcus faecalis
MYSIGLDLGISSVGWSVIDERTGNVIDLGVRLFSAKNSEKNLERRTNRGGRRLIRRKTNRLKDAKKILAAVGFYEDKSLKNSCPYQLRVKGLTEPLSKGEIYKVTLHILKKRGISYLDEDDTEAAKESQDYKEQVRENAQLLTKYTPGQIQLQRLKENNRVKTGINAQGNYQLNVFKVSAYANELATILKTQQAFYPNELTDDWIALFVQPGIAEEAGLIYRKRPYYHGPGNEANNSPYGRWSDFKKTGQPATNIFDKLIGKDFQGELRASGLSLSAQQYNLLNDLTNLKIDGEIPLSPEQKEYILAELMTKEFTRFGVNDVVKLLGVKKERLSGWRLDKKGKPEIHTLKGYRNWRKIFAESGIDLAMLPTETIDCLAKILTLNTEREGIENTLAFELPELAESVKLLVLDRYKELSQSVSTQAWHRFSLKTLHLLIPELMNATSEQNTLLEQFQLKSDVRKRYSEYKKLPTKDVLTEIYNPTVNKTVSQAFKVIDALLVKYGKEQIRYITIEMPRDDNEEDEKKRIKELHAKNSQRKNDSQSYFMQKSGWSQEKFQTTIQKNRRFLAKLLYYYEQDGICAYTGLSISPELLVSDSTEIDHIIPISISLDDSINNKVLVLSKANQVKGQQTPYDAWMDGSFKKINGKFSNWDDYQKWVESRHFSHKKENNLLETRNIFDSEQVEKFLARNLNDTRYASRLVLNTLQSFFANQETKVRVVNGSFTHTLRKKWGADLDKTRETHHHHAVDATLCAVTPFVKVSRYHYAVKEETGEKVMREIDFETGEIVDEMSYREFKKSKKYERKTYQVKWPNFREQLKPVNLHPRIKFSHQVDRKANRKLSDATIYSVREKTEVKTLKSGKQKITTDEYTIGKIKDIYTVDGWEAFKKKQDKLLMKDLDEKTYERLLSIAETTPDFQEVEEKNGKVKRVKRSPFAVYCEENDIPAIRKYAKKNNGPLIRSLKYYDGKLNKHINITKDSQGRPVEKTKNGRKVTLQSLKPYRYDIYQDLETKAYYTVQLYYSDLRFVEGKYGITEKEYMKKVAEQTKGQVVRFCFSLQKNDGLEIEWKDSQRYDVRFYNFQSANSINFKGLEQEMMPAENQFKQKPYNNGAINLNIAKYGKEGKKLRKFNTDILGKKHYLYYEKEPKNIIK

SEQ ID NO: 412 - protein, 1150 aa, Enterococcus faecalis
MYSIGLDLGISSVGWSVIDERTGNVIDLGVRLFSAKNSEKNLERRTNRGGRRLIRRKTNRLKDAKKILAAVGFYEDKSLKNSCPYQLRVKGLTEPLSKGEIYKVTLHILKKRGISYLDEDDTEAAKESQDYKEQVRKNAQLLTKYTPGQIQLQRLKENNRVKTGINAQGNYQLNVFKVSAYANELATILKTQQAFYPNELTDDWIALFVQPGIAEEAGLIYRKRPYYHGPGNEANNSPYGRWSDFKKTGQPATNIFDRLIGKDFQGELRASGLSLSAQQYNLLNDLTNLKIDGEIPLSPEQKEYILAELMTKEFTRFGVNDVAKLLGVKKERLSGWRLDKKGKPEIHTLKGYRNWRKIFAESGIDLATLPTETIDCLAKVLTLNTEHEGIENTLAFELPELAESVKLLVLDRYKELSQSVSTQAWHRFSLKTLHLLIPELMNATSEQNTLLEQFQLKSDVRKRYSEYKKLPTKDVLTEIYNPTVNKTVSQAFKVIDALLVKYGKEQIRYITIEMPRDDNEEDEKKRIKELHAKNSQRKNDSQSYFMQKSGWSQEKFQTTIQKNRRFLAKLLYYYEQDGICAYTGLSISPELLVSDSTEIDHIIPISISLDDSINNKVLVLSKANQVKGQQTPYDAWMDGSFKKINGKFSNWDDYQKWVESRHFSHKKENNLLETRNIFDSEQVEKFLARNLNDTRYASRLVLNTLQSFFANHETKVRVVNGSFTHTLRKKWGADLDKTRETHHHHAVDATLCAVTPFVKVSRYHYAVKEETGEKVMREIDFETGEIVDEMSYQEFKKSKKYERKTYQVKWPNFREQLKPVNLHPRIKFSHQVDRKANRKLSDATIYSVREKTEVKTLKSGKQKITTDEYTIGKIKDIYTVDGWEAFKKKQDKLLMKDLDEKTYERLLSIAETTPDFQEVEEKNGKVKRVKRSPFAVYCEENDIPAIQKYAKKNNGPLIRSLKYYDGKLNKHINITKDSQGRPVEKTKNGRKVTLQSLKPYRYDIYQDLETKAYYTVQLYYSDLRFVEGKYGITEKEYMKKVAEQTKGQVVRFCFSLQKNDGLEIEWKDSQRYDVRFYNFQSANSINFKGLEQEMMPAENQFKQKPYNNGAINLNIAKYGKEGKKLRKFNTDILGKKHYLYYEKEPKNIIK

SEQ ID NO: 413 - protein, 1150 aa, Enterococcus faecalis
MYSIGLDLGISSVGWSVIDERTGNVIDLGVRLFSAKNSEKNLERRTNRGGRRLIRRKTNRLKDAKKILAAVGFYEDKSLKNSCPYQLRVKGLTEPLSKGEIYKVTLHILKKRGISYLDEDDTEAAKESQDYKEQVRKNAQLLTKYTPGQIQLQRLKENNRVKTGINVQGNYQLNVFKVSAYANELATILKTQQAFYPNELTDDWIALFVQPGIAEEAGLIYRKRPYYHGPGNEANNSPYGRWSDFQKTGEPATNIFDKLIGKDFQGELRASGLSLSAQQYNLLNDLTNLKIDGEVPLSSEQKEYILTELMTKEFTRFGVNDVVKLLGVKKERLSGWRLDKKGKPEIHTLKGYRNWRKIFAEAGIDLATLPTETIDCLAKVLTLNTEREGIENTLAFELPELSESVKLLVLDRYKELSQSISTQSWHRFSLKTLHLLIPELMNATSEQNTLLEQFQLKSDVRKRYSEYKKLPTKDVLAEIYNPTVNKTVSQAFKVIDALLVKYGKEQIRYITIEMPRDDNEEDEKKRIKELHAKNSQRKNDSQSYFMQKSGWSQEKFQTTIQKNRRFLAKLLYYYEQDGICAYTGLPISPELLVSDSTEIDHIIPISISLDDSINNKVLVLSKANQVKGQQTPYDAWMDGSFKKINGKFSNWDDYQKWVESRHFSHKKENNLLETRNIFDSEQVEKFLARNLNDTRYASRLVLNTLQSFFTNQETKVRVVNGSFTHTLRKKWGADLDKTRETHHHHAVDATLCAVTPFVKVSRYHYAVKEETGEKVMREIDFETGEIVNEMSYREFKKSKKYERKTYQVKWPNFREQLKPVNLHPRIKFSHQVDRKANRKLSDATIYSVREKTEVKTLKSGKQKITTDEYTIGKIKDIYTLDGWEAFKKKQDKLLMKDLDEKTYERLLSIAETTPDFQEVEEKNGKVKRVKRSPFAVYCEENDIPAIQKYAKKNNGPLIRSLKYYDGKLNKHINITKDSQGRPVEKTKNGRKVTLQSLKPYRYDIYQDLETKAYYTVQLYYSDLRFVEGKYGITEKEYMKKVAEQTKGQVVRFCFSLQKNDGLEIEWKDSQRYDVRFYNFQSANSINFKGLEQEIMPAENQFKQKPYNNGAINLNIAKYGKEGKKLRKFNTDILGKKHYLFYEKEPKNIIK

SEQ ID NO: 414 - protein, 1150 aa, Enterococcus faecalis; identical to SEQ ID NO: 183

SEQ ID NO: 415 - protein, 1150 aa, Enterococcus faecalis; identical to SEQ ID NO: 184

SEQ ID NO: 416 - protein, 1340 aa, Enterococcus faecium
MKKEYTIGLDIGTNSVGWSVLTDDYRLVSKKMKVAGNTEKSSTKKNFWGVRLFDEGQTAEARRSKRTARRRLARRRQRILELQKIFAPEILKIDEHFFARLNESFLVLDEKKQSRHPVFATIKQEKSYHQTYPTIYHLRQALADSSEKADIRLVYLAMAHLLKYRGHFLIEGELNTENSSVTETFRQFLSTYNQQFSEADDKQTEKLDEAVDCSFVFTEKMSKTKKAETLLKYFPHEKSNGYLSQFIKLMVGNQGNFKNVFGLEEEAKLQFSKETYEEDLEELLEKIGDDYIDLFVQAKNVYDAVLLSEILSDSTKNTRAKLSAGMIRRYDAHKEDLVLLKRFVKENLPKKYRAFFGDNSVNGYAGYIEGHATQEDFYKFVKKELTGIRGSEVFLTKIEQENFLRKQRTFDNGVIPHQIHLTELRAIIANQKKHYPFLKEEQEKLESLLTFKIPYYVGPLAKKQENSPFAWLIRKSEEKIKPWNLPEIVDMEGSAVRFIERMNNTDMYIPHNKVLPKNSLLYQKFSIYNELTKVRYQDERGQMNYFSSIEKKEIFHELFEKNRKVTKKDLQEFLYLKYDIKHAELSGIEKAFNASYTTYHDFLTMSENKREMKQWLEDPELASMFEEIIKTLTVFEDREMIKTRLSHHEATLGKHIIKKLTKKHYTGWGRLSKELIQGIRDKQSNKTILDYLINDDDFPHHRNRNFMQLINDDSLSFKKEIKKAQMITDTENLEEIVKELTGSPAIKKGILQSLKIVDEIVGIMGYEPANIVVEMARENQTTGRGLKSSRPRLKALEESLKDFGSQLLKEYPTDNSSLQKDRLYLYYLQNGRDMYTGAPLDIHRLSDYDIDHIIPRSFTTDNSIDNKVLVSSKENRLKKDDVPSEKVVKKMRSFWYDLYSSKLISKRKLDNLTKIKLTEEDKAGFIKRQLVETRQITKHVAGILHHRFNKAEDTNEPIRKVRIITLKSALVSQFRNRFGIYKVREINEYHHAHDAYLNGVVALALLKKYPQLAPEFVYGEYLKFNAHKANKATVKKEFYSNIMKFFESDTPVCDENGEIFWDKSKSIAQVKKVINHHHMNIVKKTEIQKGGFSKETVEPKKDSSKLLPRKNNWDPAKYGGLGSPNVAYTVAFTYEKGKARKRTNALEGITIMEREAFEQSPVLFLKNKGYEQAEIEMKLPKYALFELENGRKRMVASNKEAQKANSFLLPEHLVTLLYHAKQYDEISHKESFDYVNEHHKEFSEVFARVLEFAGKYTLAEKNIEKLEKIYKENQTDDLAKLASSFVNLMQFNAMGAPADFKFFDVTIPRKRYTSLTEIWQSTIIHQSITGLYETRIRMGK

SEQ ID NO: 417 - protein, 1339 aa, Enterococcus faecium
MKKEYTIGLDIGTNSVGWSVLTDDYRLVSKKMKVAGNTEKSSTKKNFWGVRLFDEGQTAEARRSKRTARRRLARRRQRILELQKIFAPEILKIDEHFFARLNESFLVLDEKKQSRHPVFATIKQEKSYHQTYPTIYHLRQALADSSEKADIRLVYLAMAHLLKYRGHFLIEGELNTENSSVTETFRQFLSTYNQQFSEADDKQTEKLDEAVDCSFVFTEKMSKTKKAETLLKYFPHEKSNGYLSQFIKLMVGNQGNFKNVFGLEEAKLQFSKETYEEDLEELLEKIGDDYIDLFVQAKNVYDAVLLSEILSDSTKNTRAKLSAGMIRRYDAHKEDLVLLKRFVKENLPKKYRAFFGDNSVNGYAGYIEGHATQEDFYKFVKKELTGIRGSEVFLTKIEQENFLRKQRTFDNGVIPHQIHLTELRAIIANQKKHYPFLKEEQEKLESLLTFKIPYYVGPLAKKQENSPFAWLIRKSEEKIKPWNLPEIVDMEGSAVRFIERMINTDMYMPHNKVLPKNSLLYQKFSIYNELTKVRYQDERGQMNYFSSIEKKEIFHELFEKNRKVTKKDLQEFLYLKYDIKHAELSGIEKAFNASYTTYHDFLTMSENKREMKQWLEDPELASMFEEIIKTLTVFEDREMIKTRLSHHEATLGKHIIKKLTKKHYTGWGRLSKELIQGIRDKQSNKTILDYLINDDDFPHHRNRNFMQLINDDSLSFKKEIKKAQMITDTENLEEIVKELTGSPAIKKGILQSLKIVDEIVGIMGYEPANIVVEMARENQTTGRGLKSSRPRLKALEESLKDFGSQLLKEYPTDNSSLQKDRLYLYYLQNGRDMYTGAPLDIHRLSDYDIDHIIPRSFTTDNSIDNKVLVSSKENRLKKDDVPSEKVVKKMRSFWYDLYSSKLISKRKLDNLTKIKLTEEDKAGFIKRQLVETRQITKHVAGILHHRFNKAEDTNEPIRKVRIITLKSALVSQFRNRFGIYKVREINEYHHAHDAYLNGVVALALLKKYPQLAPEFVYGEYLKFNAHKANKATVKKEFYSNIMKFFESDTPVCDENGEIFWDKSKSIAQVKKVINHHHMNIVKKTEIQKGGFSKETVEPKKDSSKLLPRKNNWDPAKYGGLGSPNVAYTVAFTYEKGKARKRTNALEGITIMEREAFEQSPVLFLKNKGYEQAEIEMKLPKYALFELENGRKRMVASNKEAQKANSFLLPEHLVTLLYHAKQYDEISHKESFDYVNEHHKEFSEVFARVLEFAGKYTLAEKNIEKLEKIYKENQTDDLAKLASSFVNLMQFNAMGAPADFKFFDVTIPRKRYTSLTEIWQSTIIHQSITGLYETRIRMGK

SEQ ID NO: 418 - protein, 1340 aa, Enterococcus faecium
MKKEYTIGLDIGTNSVGWSVLTDDYRLVSKKMKVAGNTEKSSTKKNFWGVRLFDEGQTAEARRSKRTARRRLARRRQRILELQKIFAPEILKIDEHFFARLNESFLVLDEKKQSRHPVFATIKQEKSYHQTYPTIYHLRQALADSSEKADIRLVYLAMAHLLKYRGHFLIEGELNTENSSVTETFRQFLSTYNQQFSEADDKQTEKLDEAVDCSFVFTEKMSKTKKAETLLKYFPHEKSNGYLSQFIKLMVGNQGNFKNVFGLEEEAKLQFSKETYEEDLEELLEKIGDDYIDLFVQAKNVYDAVLLSEILSDSTKNTRAKLSAGMIRRYDAHKEDLVLLKRFVKENLPKKYRAFFGDNSVNGYAGYIEGHATQEDFYKFVKKELTGIRGSEVFLTKIEQENFLRKQRTFDNGVIPHQIHLTELRAIIANQKKHYPFLKEEQEKLESLLTFKIPYYVGPLAKKQENSPFAWLIRKSEEKIKPWNLPEIVDMEGSAVRFIERMINTDMYIPHNKVLPKNSLLYQKFSIYNELTKVRYQDERGQMNYFSSIEKKEIFHELFEKNRKVTKKDLQEFLYLKYDIKHAELSGIEKAFNASYTTYHDFLTMSENKREMKQWLEDPELASMFEEIIKTLTVFEDREMIKTRLSHHEATLGKHIIKKLTKKHYTGWGRLSKELIQGIRDKQSNKTILDYLINDDDFPHHRNRNFMQLINDDSLSFKKEIKKAQMITDTENLEEIVKELTGSPAIKKGILQSLKIVDEIVGIMGYEPANIVVEMARENQTTGRGLKSSRPRLKALEESLKDFGSQLLKEYPTDNSSLQKDRLYLYYLQNGRDMYTGAPLDIHRLSDYDIDHIIPRSFTTDNSIDNKVLVSSKENRLKKDDVPSEKVVKKMRSFWYDLYSSKLISKRKLDNLTKIKLTEEDKAGFIKRQLVETRQITKHVAGILHHRFNKAEDTNEPIRKVRIITLKSALVSQFRNRFGIYKVREINEYHHAHDAYLNGVVALALLKKYPQLAPEFVYGEYLKFNAHKANKATVKKEFYSNIMKFFESDTPVCDENGEIFWDKSKSIAQVKKVINHHHMNIVKKTEIQKGGFSKETVEPKKDSSKLLPRKNNWDPAKYGGLGSPNVAYTVAFTYEKGKARKRTNALEGITIMEREAFEQSPVLFLKNKGYEQAEIEMKLPKYALFELENGRKRMVASNKEAQKANSFLLPEHLVTLLYHAKQYDEISHKESFDYVNEHHKEFSEVFARVLEFAGKYTLAEKNIEKLEKIYKENQTDDLAKLASSFVNLMQFNAMGAPADFKFFDVTIPRKRYTSLTEIWQSTIIHQSITGLYETRIRMGK

SEQ ID NO: 419 - protein, 1340 aa, Enterococcus faecium
MKKEYTIGLDIGTNSVGWSVLTDDYRLVSKKMKVAGNTEKSSTKKNFWGVRLFDEGQTAEARRSKRTARRRLARRRQRILELQKIFAPEILKIDEHFFARLNESFLVLDEKKQSRHPVFATIKQEKSYHQTYPTIYHLRQALADSSEKADIRLVYLAMAHLLKYRGHFLIEGELNTENSSVTETFRQFLSTYNQQFSEADDKQTEKLDEAVDCSFVFTEKMSKTKKAETLLKYFPHEKSNGYLSQFIKLMVGNQGNFKNVFGLEEEAKLQFSKETYEEDLEELLEKIGDDYIDLFVQAKNVYDAVLLSEILSDSTKNTRAKLSAGMIRRYDAHKEDLVLLKRFVKENLPKKYRAFFGDNSVNGYAGYIEGHATQEDFYKFVKKELTGIRGSEVFLTKIEQENFLRKQRTFDNGVIPHQIHLTELRAIIANQKKHYPFLKEEQEKLESLLTFKIPYYVGPLAKKQENSPFAWLIRKSEEKIKPWNLPEIVDMEGSAVRFIERMINTDMYMPHNKVLPKNSLLYQKFSIYNELTKVRYQDERGQMNYFSSIEKKEIFHELFEKNRKVTKKDLQEFLYLKYDIKHAELSGIEKAFNASYTTYHDFLTMSENKREMKQWLEDPELASMFEEIIKTLTVFEDREMIKTRLSHHEATLGKHIIKKLTKKHYTGWGRLSKELIQGIRDKQSNKTILDYLINDDDFPHHRNRNFMQLINDDSLSFKKEIKKAQMITDTENLEEIVKELTGSPAIKKGILQSLKIVDEIVGIMGYEPANIVVEMARENQTTGRGLKSSRPRLKALEESLKDFGSQLLKEYPTDNSSLQKDRLYLYYLQNGRDMYTGAPLDIHRLSDYDIDHIIPRSFTTDNSIDNKVLVSSKENRLKKDDVPSEKVVKKMRSFWYDLYSSKLISKRKLDNLTKIKLTEEDKAGFIKRQLVETRQITKHVAGILHHRFNKAEDTNEPIRKVRIITLKSALVSQFRNRFGIYKVREINEYHHAHDAYLNGVVALALLKKYPQLAPEFVYGEYLKFNAHKANKATVKKEFYSNIMKFFESDTPVCDENGEIFWDKSKSIAQVKKVINHHHMNIVKKTEIQKGGFSKETVEPKKDSSKLLPRKNNWDPAKYGGLGSPNVAYTVAFTYEKGKARKRTNALEGITIMEREAFEQSPVLFLKNKGYEQAEIEMKLPKYALFELENGRKRMVASNKEAQKANSFLLPEHLVTLLYHAKQYDEISHKESFDYVNEHHKEFSEVFARVLEFAGKYTLAEKNIEKLEKIYKENQTDDLAKLASSFVNLMQFNAMGAPADFKFFDVTIPRKRYTSLTEIWQSTIIHQSITGLYETRIRMGK

SEQ ID NO: 420 - protein, 1339 aa, Enterococcus faecium
MKKEYTIGLDIGTNSVGWSVLTDDYRLVSKKMKVAGNTEKSSTKKNFWGVRLFDEGQTAEARRSKRTARRRLARRRQRILELQKIFAPEILKIDEHFFARLNESFLVLDEKKQSRHPVFATIKQEKSYHQTYPTIYHLRQALADSSEKADIRLVYLAMAHLLKYRGHFLIEGELNTENSSVTETFRQFLSTYNQQFSEADDKQTEKLDEAVDCSFVFTEKMSKTKKAETLLKYFPHEKSNGYLSQFIKLMVGNQGNFKNVFGLEEAKLQFSKETYEEDLEELLEKIGDDYIDLFVQAKNVYDAVLLSEILSDSTKNTRAKLSAGMIRRYDAHKEDLVLLKRFVKENLPKKYRAFFGDNSVNGYAGYIEGHATQEDFYKFVKKELTGIRGSEVFLTKIEQENFLRKQRTFDNGVIPHQIHLTELRAIIANQKKHYPFLKEEQEKLESLLTFKIPYYVGPLAKKQENSPFAWLIRKSEEKIKPWNLPEIVDMEGSAVRFIERMINTDMYIPHNKVLPKNSLLYQKFSIYNELTKVRYQDERGQMNYFSSIEKKEIFHELFEKNRKVTKKDLQEFLYLKYDIKHAELSGIEKAFNASYTTYHDFLTMSENKREMKQWLEDPELASMFEEIIKTLTVFEDREMIKTRLSHHEATLGKHIIKKLTKKHYTGWGRLSKELIQGIRDKQSNKTILDYLINDDDFPHHRNRNFMQLINDDSLSFKKEIKKAQMITDTENLEEIVKELTGSPAIKKGILQSLKIVDEIVGIMGYEPANIVVEMARENQTTGRGLKSSRPRLKALEESLKDFGSQLLKEYPTDNSSLQKDRLYLYYLQNGRDMYTGAPLDIHRLSDYDIDHIIPRSFTTDNSIDNKVLVSSKENRLKKDDVPSEKVVKKMRSFWYDLYSSKLISKRKLDNLTKIKLTEEDKAGFIKRQLVETRQITKHVAGILHHRFNKAEDTNEPIRKVRIITLKSALVSQFRNRFGIYKVREINEYHHAHDAYLNGVVALALLKKYPQLAPEFVYGEYLKFNAHKANKATVKKEFYSNIMKFFESDTPVCDENGEIFWDKSKSIAQVKKVINHHHMNIVKKTEIQKGGFSEETVEPKKDSSKLLPRKNNWDPAKYGGLGSPNVAYTVAFTYEKGKARKRTNALEGITIMEREAFEQSPVLFLKNKGYEQAEIEMKLPKYALFELENGRKRMVASNKEAQKANSFLLPEHLVTLLYHAKQYDEISHKESFDYVNEHHKEFSEVFARVLEFAGKYTLAEKNIEKLEKIYKENQTDDLAKLASSFVNLMQFNAMGAPADFKFFDVTIPRKRYTSLTEIWQSTIIHQSITGLYETRIRMGK

SEQ ID NO: 421 - protein, 1340 aa, Enterococcus faecium
MKKEYTIGLDIGTNSVGWSVLTDDYRLVSKKMKVAGNTEKSSTKKNFWGVRLFDEGQTAEARRSKRTARRRLARRRQRILELQKIFAPEILKIDEHFFARLNESFLVLDEKKQSRHPVFATIKQEKSYHQTYPTIYHLRQALADSSEKADIRLVYLAMAHLLKYRGHFLIEGELNTENSSVTETFRQFLSTYNQQFSEADDKQTEKLDEAVDCSFVFTEKMSKTKKAETLLKYFPHEKSNGYLSQFIKLMVGNQGNFKNVFGLEEEAKLQFSKETYEEDLEELLEKIGDDYIDLFVQAKNVYDAVLLSEILSDSTKNTRAKLSAGMIRRYDAHKEDLVLLKRFVKENLPKKYRAFFGDNSVNGYAGYIEGHATQEDFYKFVKKELTGIRGSEVFLTKIEQENFLRKQRTFDNGVIPHQIHLTELRAIIANQKKHYPFLKEEQEKLESLLTFKIPYYVGPLAKKQENSPFAWLIRKSEEKIKPWNLPEIVDMEGSAVRFIERMINTDMYIPHNKVLPKNSLLYQKFSIYNELTKVRYQDERGQMNYFSSIEKKEIFHELFEKNRKVTKKDLQEFLYLKYDIKHAELSGIEKAFNASYTTYHDFLTMSENKREMKQWLEDPELASMFEEIIKTLTVFEDREMIKTRLSHHEATLGKHIIKKLTKKHYTGWGRLSKELIQGIRDKQSNKTILDYLINDDDFPHHRNRNCMQLINDDSLSFKKEIKKAQMITDTENLEEIVKELTGSPAIKKGILQSLKIVDEIVGIMGYEPANIVVEMARENQTTGRGLKSSRPRLKALEESLKDFGSQLLKEYPTDNSSLQKDRLYLYYLQNGRDMYTGAPLDIHRLSDYDIDHIIPRSFTTDNSIDNKVLVSSKENRLKKDDVPSEKVVKKMRSFWYDLYSSKLISKRKLDNLTKIKLTEEDKAGFIKRQLVETRQITKHVAGILHHRFNKAEDTNEPIRKVRIITLKSALVSQFRNRFGIYKVREINEYHHAHDAYLNGVVALALLKKYPQLAPEFVYGEYLKFNAHKANKATVKKEFYSNIMKFFESDTPVCDENGEIFWDKSKSIAQVKKVINHHHMNIVKKTEIQKGGFSKETVEPKKDSSKLLPRKNNWDPTKYGGLGSPNVAYTVAFTYEKGKARKRTNALEGITIMEREAFEQSPVLFLKNKGYEQAEIEMKLPKYALFELENGRKRMVASNKEAQKANSFLLPEHLVTLLYHAKQYDEISHKESFDYVNEHHKEFSEVFARVLEFAGKYTLAEKNIEKLEKIYKENQTDDLAKLASSFVNLMQFNAMGAPADFKFFDVTIPRKRYTSLTEIWQSTIIHQSITGLYETRIRMGK

SEQ ID NO: 422 - protein, 892 aa, Enterococcus faecium
MTFKIPYYVGPLAKKQENSPFAWLIRKSEEKIKPWNLPEIVDMEGSAVRFIERMINTDMYMPHNKVLPKNSLLYQKFSIYNELTKVRYQDERGQMNYFSSIEKKEIFHELFEKNRKVTKKDLQEFLYLKYDIKHAELSGIEKAFNASYTTYHDFLTMSENKREMEQWLEDPELASMFEEIIKTLTVFEDREMIKTRLSHHKATLGKHIIKKLTKKHYTGWGRLSKELIQGIRDKQSNKTILDYLINDDDFPHHRNRNFMQLINDDSLSFKKEIKKAQMITDTENLEEIVKELTGSPAIKKGILQSLKIVDEIVGIMGYEPANIVVEMARENQTTGRGLKSSRPRLKALEESLKDFGSQLLKEYPTDNSSLQKDRLYLYYLQNGRDMYTGAPLDIHRLSDYDIDHIIPRSFTTDNSIDNKVLVSSKENRLKKDDVPSEKVVKKMRSFWYDLYSSKLISKRKLDNLTKIKLTEEDKAGFIKRQLVETRQITKHVAGILHHRFNKAEDTNEPIRKVRIITLKSALVSQFRNRFGIYKVREINEYHHAHDAYLNGVIALALLKKYPQLAPEFVYGEYLKFNAHKANKATVKKEFYSNIMKFFESDTPVCDENGEIFWDKSKSIAQVKKVINHHHMNIVKKTEIQKGGFSKETVEPKKDSSKLLPRKNNWDPAKYGGLGSPNVAYTVAFTYEKGKARKRTNALEGITIMEREAFEQSPVLFLKNKGYEQAEIEMKLPKYALFELENGRKRMVASNKEAQKANSFLLPEHLVTLLYHAKQYDEISHKESFDYVNEHHKEFSEVFARVLEFAGKYTLAEKNIEKLEKIYKENQTDDLAKLASSFVNLMQFNAMGAPADFKFFDVTIPRKRYTSLTEIWQSTIIHQSITGLYETRIRMGK

SEQ ID NO: 423 - protein, 1336 aa, Enterococcus hirae
MTKDYTIGLDIGTNSVGWAVLTDDYQLMKRKMSVHGNTEKKKIKKNFWGARLFDEGQTAEFRRTKRTNRRRLARRKYRLSKLQDLFAEELCKQDDCFFVRLEESFLVPEEKQYKPASIFPTLEEEKEYYQKYPTIYHLRQKLVDSTEKEDLRLVYLALAHLLKYRGHFLFEGDLDTENTSIEESFRVFLEQYSKQSDQPLIVHQPVLTILTDKLSKTKKVEEILKYYPTEKINSFFAQCLKLIVGNQANFKRIFDLEAEVKLQFSKETYEEDLESLLEKIGDEYLDIFLQAKKVHDAILLSEIISSTVKHTKAKLSSGMVERYERHKADLAKFKQFVKENVPQKATVFFKDTTKNGYAGYIKGKTTQEEFYKFVKKELSGVVGSEPFLEKIDQETFLLKQRTYTNGVIPHQVHLIELKAIIDQQKQHYPFLEEAGPKIIALFKFRIPYYVGPLAKEQEASSFAWIERKTAEKINPWNFSEVVDIEKSAMRFIQRMTKQDTYLPTEKVLPKNSLLYQKYMIFNELTKVSYKDERGVKQYFSGDEKQQIFKQLFQKERGKITVKKLQNFLYTHYHIENAQIFGIEKAFNASYSTYHDFMKLAKTNQKAMQEWLEQPEMEPIFEDIVKILTIFEDRQMIKHQLSKYQEVFGEKLLKEFARKHYTGWGRFSAKLIHGIRDRKTNKTILDYLINDDDVPANRNRNLMQLINDEHLSFKEEIAKATVFSKHKSLVDVIQDLPGSPAIKKGIWQSLKIVEELIAIIGYKPKNIVIEMARENQKTHRTSPRLKALENGLKQIGSTLLKEQPTDNKALQKERLYLYYLQNGRDMYTGEPLEIENLHQYEVDHIIPRSFIVDNSIDNKVLVASKQNQKKRDDVPKKQIVNEQRIFWNQLKEAKLISPKKYAYLTKIELTPEDKARFIQRQLVETRQITKHVANILHQSFNQEEEGTDCDGVQIITLKATLTSQFRQTFGLYKVREINPHHHAHDAYLNGFIANVLLKRYPKLAPEFVYGKYVKYSLARENKATAKKEFYSNILKFLESDEPFCDENGEIYWEKSHHLPRIKKVLSSHQVNVVKKVEQQKGGFYKETVNSKEKPDKLIERKNNWDVTKYGGFGSPVIAYAIAFVYAKGKTQKKTRAIEGITIMEQAAFEKDPTTFLKEKGFPQVTEFIKLPKYTLFEFDNGRRRFLASHKESQKGNPFILSDQLVTLLYHAQHYDKITYQESFDYVNTHLSDFSAILTEVLAFAEKYTLADKNIERIQELYEENKYGETSMIAQSFLQLLQFNAIGAPADFKFFGVTIPRKRYTSLTEIWDATIIYQSVTGLYETRIRMGDLWAGEQ

SEQ ID NO: 424 - protein, 116 aa, Enterococcus sp.
MYSIGLDLGISSVGWSVIDERTGNVIDLGVRLFSAKNSEKNLERRTNRGGRRLIRRKTNRLKDAKKILAAVGFYEDKSLKNSCPYQLRVKGLTELLSKGEIYKVTLHILKNVELVT

SEQ ID NO: 425 - protein, 1391 aa, Eubacterium sp.
MENKQYYIGLDVGTNSVGWAVTDTSYNLLRAKGKDMWGARLFDEAKTAVERRTKRTSRRRSEREKARKAMLKELFADEINKVDPNFFIRLEESKFFLDDRSENNRQRYTLFNDAKFTDKDYYEKYKTIFHLRSALINSDEKFDVRLVFLAILNLFSHRGHFLNASLKGDGEIQGVDIFYNDLYEVCEEFEIDLPQISNIDNFEKILSQKGKSRTKILEELSEELSISKKEKIKYSLLKLICGMKIKVVDIYADEDIQEDDKKKDLGFRESDYEKSSLEVKEIIGDDHFELIERAKAVHDIGLLANIIGNSKYLCEARVEAYDNHHKDLQKIKELLKKYDIKAYTDMFRKMTDKNYSAYVGSVNSNIAKERRSVDNRKIEDLYEYIKKIALKNISDDNEDKIEILKKIETGEFLKKQLTASNGVIPNQLQSRELRAILKKAENYLPFLKEKGEKNLTVSEMIIQLFEFQIPYYVGPLDKNPKKDKNANSWAVIPSGGRILPWNFEDKVDVKGSRKEFIEKMVRKCTYLSEEHTLPKQSLLYEKFMVLNEINNIKIDGEKISVEAKQKIYNDLFMKGKKVSQKAIKQELISLNIMSKDSVLSGIDTVCNAYLSSIAKFRGVFDENVNNQSTIDMIEDIIFLKTVYSDEKRFVKEEIVEKYGDEIDKDKIKRILGFKFSNWGNISKSFLELEGADVGTGEIRSIIQSLWETNFNLMELLSSRFTYMDELEKRVKKLEKPLSEWTIEDLDDMYLSSPVKRMIWQSMKIVDEIQTVIGYAPKRIFVEMTRSEGEKVRTKSRKDRLKELYSAIKEDSKQWVKELDAKDESYFRSKKMYLYYLQKGRCMYSGEVIELDKLMDDNLYDIDHIYPRSFVKDDSLDNLVLVKKEINNRKQNDPITPQIQASCQGFWKVLHEQGFISNEKYSRLTRKTQEFSDEEKLSFINRQIVETGQATKCMAQILQKSMGEDVDVVFSKARLVSEFRHKFELFKSRLINDFHHANDAYLNIVVGNSYFVKFTRNPANFIKDARKNPDNPAYKYHMDRFFERDVKSKSEVAWIGQSEGNAGTIAIVKKTMSKNSPLITKKVEEGHGSITKETIVGVKEIKFGRNKVEKADKTPKKANLQAYRPIKTSDERLCNILRYGGRTSISISGYCLVEYVKKRKTIRSLEAIPVYLGRKDSLSEEKLLNYFRYNLNDGGKDSVSDIRLCLPFISTNSLVKIDGYLYYLGGKNDDRIQLYNAYQLKMKKEEVEYIRKIEKAVSMSKFDEIDREKNPVLTEEKNIELYNKIQDKFENTVFSKRMSLVKYNKKDLSFGDFLKNKKSKFEEIDLEKQCKVLYNIIFNLSNLKEVDLSDIGGSKSTGKCRCKKNITNYKEFKLIQQSITGLYSCEKDLMTI

SEQ ID NO: 426 - protein, 1391 aa, Eubacterium yurii
MENKQYYIGLDVGTNSVGWAVTDTSYNLLRAKGKDMWGARLFEKANTAAERRTKRTSRRRSEREKARKAMLKELFADEINRVDPSFFIRLEESKFFLDDRSENNRQRYTLFNDATFTDKDYYEKYKTIFHLRSALINSDEKFDVRLVFLAILNLFSHRGHFLNASLKGDGDIQGMDVFYNDLVESCEYFEIELPRITNIDNFEKILSQKGKSRTKILEELSEELSISKKDKSKYNLIKLISGLEASVVELYNIEDIQDENKKIKIGFRESDYEESSLKVKEIIGDEYFDLVERAKSVHDMGLLSNIIGNSKYLCEARVEAYENHHKDLLKIKELLKKYDKKAYNDMFRKMTDKNYSAYVGSVNSNIAKERRSVDKRKIEDLYKYIEDTALKNIPDDNKDKIEILEKIKLGEFLKKQLTASNGVIPNQLQSRELRAILKKAENYLPFLKEKGEKNLTVSEMIIQLFEFQIPYYVGPLDKNPKKDNKANSWAKIKQGGRILPWNFEDKVDVKGSRKEFIEKMVRKCTYISDEHTLPKQSLLYEKFMVLNEINNIKIDGEKISVEAKQKIYNDLFVKGKKVSQKDIKKELISLNIMDKDSVLSGTDTVCNAYLSSIGKFTGVFKEEINKQSIVDMIEDIIFLKTVYGDEKRFVKEEIVEKYGDEIDKDKIKRILGFKFSNWGNLSKSFLELEGADVGTGEVRSIIQSLWETNFNLMELLSSRFTYMDELEKRVKKLEKPLSEWTIEDLDDMYLSSPVKRMIWQSMKIVDEIQTVIGYAPKRIFVEMTRSEGEKVRTKSRKDRLKELYNGIKEDSKQWVKELDSKDESYFRSKKMYLYYLQKGRCMYSGEVIELDKLMDDNLYDIDHIYPRSFVKDDSLDNLVLVKKEINNRKQNDPITPQIQASCQGFWKILHDQGFMSNEKYSRLTRKTQEFSDEEKLSFINRQIVETGQATKCMAQILQKSMGEDVDVVFSKARLVSEFRHKFELFKSRLINDFHHANDAYLNIVVGNSYFVKFTRNPANFIKDARKNPDNPVYKYHMDRFFERDVKSKSEVAWIGQSEGNSGTIVIVKKTMAKNSPLITKKVEEGHGSITKETIVGVKEIKFGRNKVEKADKTPKKPNLQAYRPIKTSDERLCNILRYGGRTSISISGYCLVEYVKKRKTIRSLEAIPVYLGRKDSLSEEKLLNYFRYNLNDGGKDSVSDIRLCLPFISTNSLVKIDGYLYYLGGKNDDRIQLYNAYQLKMKKEEVEYIRKIEKAVSMSKFDEIDREKNPVLTEEKNIELYNKIQDKFENTVFSKRMSLVKYNKKDLSFGDFLKNKKSKFEEIDLEKQCKVLYNIIFNLSNLKEVDLSDIGGSKSTGKCRCKKNITNYKEFKLIQQSITGLYSCEKDLMTI

SEQ ID NO: 427 - protein, 1142 aa, Facklamia hominis
MYSVGLDIGIASCGYSIINDVNGNIVELGTLLFKSRNSDNNEERRTNRGSRRLINRRRTRLDDGKKLLAEKGFKQDSKLKHVCPYELRVKGLHEKLTQGEIYKVVLHILKKRGISYLDESDENSSGIDGASYKDQVNLNLNLQKELTPGQIQLKRLKENGRIKSGVTFENGYQLNVFSVSAYANELNKILTKQSEYYSEIDQIWIDRFTKNGYRKEAGLVYRKRPYYDGPGNEKNNSIYGRWANFKEDGHPKENIFDQLIGLDSVDSTQVRASASTLTAQKYNLLNDLNNLTIIEDDRKFTTDEKVSIINYLMTQDITRFGPKELAKFYQLEVDQIRGWRIDNKGNPEIHSLKVYRDWKKIFNTSSIDLTSIQTWVVDELANVITLNTEIPSTLATLKIKIPDIDQQILNFVENNFYELKKKTSKNSWHSFSLKTLNILIPELLNTSEEQNTILERLNLKFDLKNKYAEKNQIPVKELLEQIYNPTVTKSVHQSIKLFNEIIEKYGKNNISYVTIEMPRDKNDQDQKDTIKRINKLNSERKNDSEKYFLERSGWDTIRFESALKKPRFAEKLLFYYEQKGKCAYSGQDILAESLLNESCEVDHIIPLSISFDDSIHNKVLVTASSNQEKGQRTPYMAFIDGAKLGQSWDDFVAWVNSCGFHRKKVQNLLYEENIFNPDVQRGFVSRNLNDTRYASRIVLNAIQSFFYKQKDLTKVKVVNGSFTHTLRKKWGSSLDKNRDTYHHHAVDATLCAVTPFINIVKYEFFEEDGIKYMVDLTTGEKVAYSDYKKMKFYDKRAYVPIWDGFIKQLTPANLYPKIKFSHQVDSKWNRKISDATIYSTRKIVETKINKKGVAKETVKDIVIDKIKDIYTPEGWRKFKEKQDKLLMKNFDEKTYNKLIKIAKEYPEKKEVQTSNGKVSLVEVSPFKMYCEEQNVPAIRKYSKKGNGPYIRSLKFYDKELGKHINITKDSYGNDIERTIRNKKIILKNQNSWRTDVYYNSVNNCYELLGIKYCHLKFYRGKYGIPKSIYDELKKEDEISSESVFKFSLYRHDRVRFEKDGEYIEALFGSKNESNKNYLELSPIDKNKWLSKENVKFFGEVAASGRFIKGLKPGIKVIKQSTDYMGHVYAIHQEKLKFVLSDA

SEQ ID NO: 428 - protein, 1347 aa, Finegoldia magna
MKSEKKYYIGLDVGTNSVGWAVTDEFYNILRAKGKDLWGVRLFEKAKTAADTRTFRSGRRRNDRKGMRLQILREIFEDEIKKVDKDFYDRLDESKFWAEDKKVSGKYSLFNDKNFSDKQYFEKFPTIFHLRKYLMEEHGKVDIRYYFLAINQMMKRRGHFLIDGQISHVTDDKPLKEQLILLINDLLKIELEEELMDSIFEILADVNEKRTDKKNNLKELIKGQDFNKQEGNILNSIFESIVTGKAKIKNIISDEDILEKIKEDNKEDFVLTGDSYEENLQYFEEVLQENITLFNTLKSTYDFVILQSILKGKSTLSDAQVERYDEHKKDLEILKKVIKKYDEDGKLFKQVFKEDNGNGYVSYIGYYLNKNKKITAKKKISNIEFTKYVKGILEKQCDCEDEAVKYLLGKIEQENFLLKQISSINSVIPHQIHLFELDKILENLAKNYPSFNNKKEEFTKIEKIRKTFTFRIPYYVGPLNDYHKNNGGNAWIFRNKGEKIRPWNFEKIVDLHKSEEEFIKRMLNQCTYLPEETVLPKSSILYSEYMVLNELNNLRIKGKPLDTDVKLKLIEELFKKKTKVTLKSIRDYMIRNNFADKEDFDNSEKNLEIVSNMKSYIDFNNILGDKFELEMVEDLIEKITIHTGNKTLLKKYIEETYPDLSSSQIQKIINLKYKDWGRLSRKLLDGIKGRNKTDDVNTVINFMRNSSDNLMQIIEGKNYSFNEYIDNLRKKYIPQEISYEVVENLYVSPSVKKMIWQVIRVTEEITKVMGYDPDKIFIEMAKSEEEKKTTISRKNKLLDLYKAIKKDERDSQYEKLLTGLNKLDESELRSKKLYLYYTQMGRDMYTGEKIDLDKLFDSTHYDKDHIIPQSMKKDDSIINNLVLVNKNANQTTKGNIYPVPSSIRNNPDIYNYWKYLMEKEFISKEKYNRLIRNTPLTNEELGVFINRQLVETRQSTKAIKELFEKFYQKSKIIPVKASLASDLRKDMNTLKSREVNDLHHAHDAFLNIVAGDVWNREFTSNPINYVNENREGDKVKYSLSKYFTRPRKSKGKVIWTPEKGRKLIVDTLNKPSVLISNESHVKKGELFNATISGKKDYKKGKIYLPLKKDDRLKDVSKYGGYKAINGAFFFLVEHTKSKKRIRSIELFPLHLLSKFYEDKNTVLDYAINVLQLQDPKIIIDKINYRTEIIIDNFSYLISTKSNDGSITVKPNEQMYWRVDEISNLKKIENKYKKDAILTEEDRKIMESYIDKIYQQFKAGKYKNRRTTDTIIEKYEIIDLDTLDNKQLYQLLVAFISLSYKTSNNAVDFTVIGLGTECGKPRITNLPDNTYLVYKSITGIYEKRIRIK

SEQ ID NO: 429 - protein, 1348 aa, Finegoldia magna; identical to SEQ ID NO: 227

SEQ ID NO: 430 - protein, 1516 aa, Flavobacteriaceae bacterium
MLKQQKDKIIGMNKKILGLDLGTNSIGWALVKQDLENKYGEIIGCGSRIIPMSQDVLGKFDAGISISQTAERTNYRSVRKLIQRNTLRRERLHRVLHQLDFLPKHYNDSIDFEKKLGQFKTDKETKLNYFVNQHGKHEFLFKDSFNEMVKEFKEEQPELFYIKNNGKETKIPYDWTIYYLRKKALSKKISKEELSWLVLNFNQKRGYYQLRGEIDEEKEKNKRYEKLYVSEVVKTNNTIKKTGEYLYDIYFDNGWKYEKQTTKPQDWLHKHKEFIITTTTLKNGETKRTFKTVDSEKDWIAIKSKTEQDIKESNKTVGAFIYDTLLKNPTQKIRGSLVKTIERKFYREEFEKILKEQIKHRPEINVNTAIGKENYTKCVTELYPRNEAHANNILTNDFNYLFTKDILFYQRPLKSKKSEIANCQYEYRTYIKKKEKTGKEERVKQPLKATPKSHPLFQEFRLWQFIHNLKIYIRETTVGNKPLFDVDITDTFFTSENDWATLFEYLNNKKEIEQKHVLEYLVSKKIISKSEKTDYRWNYVEDKKYPGNETRVDFINRLKKVENLNVDEFLTSELEFKLWHIIYSVTDKNEYEKALENFAIRQNIDKDSFVNSFKKFPPFKSDYGAYSTKAIKKLLPLMRLGKFWDGSEIPKVVVEKITDIKTRLTSVNYDESLFKKDEKKILETIVDDITPKQLLKSFVKLKGKNHLAGLNTYQACYLVYERHSESSDITQWENPDDIDSFLNHFKQHSLRNPIVEQVVTETLRTVRDIWKYYGNGSPNYFNEIHIELGREMKNPADKRKQMSAKINENENTNQRIKGILQELMNDGVQDIKPYSPSQQEILKIYEEGISQNPNVDYSKVSEDEITKIKKSNNPTLKEIQRYKLWLEQKYISPYTGKPIPLSELFTPAYQIEHIIPQSRYFDNSLSNKIICESEVNEDKSNKTAYEYLKTNGGSIVHGHHLLSLKEYEDHCQHYFKKNRTKLKNLLSEEIPEGFINRQLNDSRYISKLIKGLLSNIVREENEQEATSKNIVPVTGSITSKLKQDWGLNDKWNEIIAPRFKRLNKMTNSNDFGYFDEKINTFRIQVPDAISRGFNKKRIDHRHHTLDALVIACCTKKHIQYLNSLNNEIIKHELKPSILIKNAQGDYTKHFMLPWNNFPIDCKNAIENTIVSFKQNLRVINKTSNKYQSYKDENGNLRLGKDGKPKKGLTKQTKGNNWAVRKAMHEDTFYGEIVDGENKGKLKIKTLLDTSFDVKKIEDKVLDKSIRTILINYLKQDKYKNLSKPHEEAFSPNGIIEMNKNIISLNNNIPHKPIKRVTLKHEKGKKFSIKTLLDKKTKFAKSATGTNVFFCIYKNINGKIKYHTPSFEEIIEIQKQEFEIKYKSKLNVPETLFDKKESFELLFYLQPNDLVYLPNDEELKNRQLIDFNNLNKKQIKRIYKFTDGSGTTANFIPYQVAKVIFNLNKKEQAKSSFKYPIQNEFGVGSPQSKNQKSIEGILIKERCIKLKIDRLGNISKA

SEQ ID NO: 431 - protein, 1629 aa, Francisella cf.
MNFKILPIAIDLGVKNTGVFSAFYQKGTSLERLDNKNGKVYELSKDSYTLLMNNRTARRHQRRGIDRKQLVKRLFKLIWTEQLNLEWDKDTQQAISFLFNRRGFSFITDGYSPEYLNIVPEQVKAILMDIFDDYNGEDDLDSYLKLATEQESKISEIYNKLMQKILEFKLRKLCTDIKDDKVSTKTLKEITSYEFELLADYLANYSEILKTQKFSYTDKQGNLKELSYYHHDKYNIQEFLKRHATINIQILDTLLTDDLDIWNFNFEKFDFDKNEEKLQNQEDKDHIQAHLHHFVFAVNKIKSEMASGGRHRSQYFQEITNVLDENNHQEGYLKNFCENLHNKKYSNLSVKNLVNLIGNLSNLELKPLRKYFNDKIHAKADHWDEQKFTETYCHWILGEWRVGVKDQDKKDGAKYSYKDLCNELKQKVTKAGLVDFLLELDPCRTIPPYLDNNNRKPPKCQSLILNPKFLDNQYPNWQQYLQELKKLQSIQNYLESFETDLKVLKSSKDQPYFVEYRSSNQQIASGQRDYKDLDARILQFIFDRVKASDELLLNEIYFQAKKLKQKASSELEKLESSKKLDEVIANSQLSQILKSQHTNGIFEQGTFLHLVCKYYKQRQRARDSRLYIMPEYRYDKKLHKYNNTGRFDDDNQLLTYCNHKPRQKRYQLLNDLAGVLQVSPNFLKDKIGSDDDLFISKWLVEHIRGFKKACEDSLKIQKDNRGLLNHKINIARNTKGKCEKEIFNLICKIEGSEDKKGNYKHGLAYELGVLLFGEPNEASKPEFDRKIKKFNSIYSFAQIQQIAFAERKGNANTCAVCSADNAHRMQQIKITEPVEDNKDKIILSAKAQRLPAITTRIVDGAVKKMATILAKNIVDDNWQNIKQVLSAKHQLHIPIITESNAFEFEPALADVKGKSLKDRRKKALERISPENIFKDKNNRIKEFAKGISAYSGANLTDGDFDGAKEELDHIIPRSHKKYGTLNDEANLICVTRGDNKNKGNRIFCLRDLANNYKLKQFETTDDLEIEKKIADTIWDANKKDFKFGNYRSFINLTPQEQKAFRHALFLADENPIKQAVIRAINNRNRTFVNGTQRYFAEVLANNIYLRAKKENLNTDKISFDYFGIPTIGNGRGIAEIRQLYEKVDSDIQAYAKGDKPQASYSHLIDAMLAFCIAADEHRNDGSIGLEIDKNYSLYPLDKNTGEVFTKDIFSQIKITDNEFSDKKLVRKKATEGFNTHRQMTRDGIYAENYLPILIHKELDEVRKGYTWKNSEEIKIFKGKKYDIQQLNNLLYCLKFVDKPISIDIQISTLEELRNILTTNNIAATAEYYYINLKTQKLHEYYIENYNTALGYKKYTKEMEFLRSLAYRSERVKIKSIDDVKQVLDKDSNFIIGKITLPFKKEWQRLYREWQNITIKDDYEFLKSFFNVKSITKLHKKVRKDFSLPISTNEGKFLVKRKTWDNNFIYQILNDSDSRVDGTKPFIPAFDISKNEIVEAIIDSFTSKNIFWLPKNIELQKVDNKNIFAIDTSKWFEVETPSDLRDIGVATIQYKIDNNSRPKVRVKLDYVIDDDSKINYFTNHSLLKSRYPDKVLEILKQSTIIEFESSGFNKTIKEMLGMTLAGIYNETSNN

SEQ ID NO: 432 - protein, 1646 aa, Francisella cf.
MNIKILPIAIDLGAKNTGVFSAFYQKGTSLESLDNKNGKVYELSKDSYTLLMNNRTARRHQRRGIDRKQLVKRLFKLIWTKQLNLEWNKDTQQTISFLLNRRGFSFITDGYSPEYLNIAPEAVKAILMSILDDYNGEDDLDSYLQSATENDSKIDELYNKLLQKALEFKLRKLCIDIKEDKVTTKTLKELSNTEFKLLANYLVDYDRILRTQKFSYTDKQGNLRELNYYHHDKYNIQEFLKRNIIINDVILEKLTDDLDIWNLNFDKFDFEKNLEKLENQEDKDYLQTHLHHFVFAVNKIKSEMASGGRHRSQYFQEITNVLVENNHQEGYLKNFCENLHNKKYSNLSVKNLVNLIGNLSNLELKPLRKYFNDKIHAKADYWDEQKFAETYSDWILGEWRVGAKDKDKKDGAKYSYKNLCDELKQKVGINQDGIINQTKSDFVDFLLELDPCRTIPPYLDNNNRKPPKCQSLILNPKFLDNKYPNWQQYLQELKKLQTVQNYLGNFEIDLKDLKSSKEQPYFVKYKSLNQQIASGQRDYKDLDARVLQFIFDRVKASDELLLNEIYSHAKKLKQNTSSELEKLELCKKLDEVIANSQLSQILKSQHVNGIFEQGTFLHLVCKYYKQRQRARDSRLYIMPEYRYDKKLDKYNNTGRFDDDNQLLTYCNHKPRQKRYQLLNDLAGVLQVSPNFLKDKIGSDDDLFISKWLVEHIRGFKKACEDSLKIQKDNRGLLNHKINIARNTKGKCEKEIFNLICKIEGSEDKKGNYKHGLAYELGVLLFGEPNQASKLEFDRKIKKFNSIYSFAQIQQIAFAERKGNANTCAVCSADNAHRMQQIKVAKPVEGNKDNIILSAKAQRLPAIPTRIVDGAVKKIATILARNIVDDNWDNIKQALSNNQQLHVPIITESNAFEFEPALADIKGKSLKDKRKKALERIDPENVFKDKNNRIKEFAKGISAYSDANLANGDFDGAKEELDHIIPRSHKKYGTLNDEANLICVTREDNQNRGNKAVFLYDLKPNYKLKQFNTTDDLEIEKKIADTIWDASKQDFKFGNYRSFINLTPQEQIAFRHALFLADKNPIKKAVIRAIDNRNRTFVNGTQRYFAEVLANNIYLRAKKENLATNRITFDYFGIETTNSNGRGIADVRKLYEKVDSDIQAYAKGDKPQDSYSHLIDAMIAFCVAADEHKNEGSIGLKMGNQYGLFPTPDKYDENTGEIISWHNDDIFRKIKVSDNQFSDKKLVRKKATEGFNTHRQMTRDGIYGESYLPILIHKNLNEVRKGYNWENSEEIKIFKGKKYDIQQLNNLVYCLKFVDKPISIDIQITTLEELRNILETNNISTTAEYYYINLKTQKLHEYYIENYNTALGYKKYTKEMEFLRSLAYRTERVKIKSIDDVSMILAKDSNFKAGKIELPFKTEWQRLYLEWQNTTIKDNHEFLKSYFSVKNATKQHKKVRKDFSLPISTNEGKLLVKRKTWDNNFIYQILNDSDSRADGTKPFIPAFDISKNEIVETIIKSFTSKNIFWLPKNIELQKVDNKSIFAIDTSRWFEVETPKDLIEIGVSTIQYKIDNNSRPKVRVKLDYVMDDDSKINYFMNHSLLKSRYPDKVLEILKQSTIIEFESSGFNKTIKEMLGMTLAGIYNETSNN

SEQ ID NO: 433 - protein, 1629 aa, Francisella novicida
MNFKILPIAIDLGVKNTGVFSAFYQKGTSLERLDNKNGKVYELSKDSYTLLMNNRTARRHQRRGIDRKQLVKKLFKLIWTEQLNLEWDKDTQQAISFLFNRRGFSFITDGYSPEYLNIVPEQVKAILMDIFDDYNGEDDLDSYLKLATEQESKISEIYNKLMQKILEFKLRKLCTDIKDDKVSTKTLKEITSYEFELLADYLANYSESLKTQKFSYTDKQGNLKELSYYHHDKYNIQEFLKRHATINDEILDTLLTDDLDIWNFNFEKFDFDKNEEKLQNQEDKDHTQAHLHHFVFAVNKIKSEMASGGRHRGQYFQEITNVLDENNHQEGYLKNFCENLHNKKYSNLSVKNLVNLIGNLSNLELKPLRKYFNDKIHAKADHWDEQKFTETYCHWILGEWRVGLKDQDKKEGAKYSYKDLCNELKQKVTNAGLIDFLLELDPCRTIPPYLDNNNRKPPKCQSLILNPKFLDNQYPNWQQYLQELKKLQIIQDYLESFETDLKVLKSSKDQPYFVEYKSSNQQIASGQRDYKDLDARILQFIFDRVKASDELLLNEIYFQAKKLKQKASSELEKLESSKKLDEVIANSQLSKILKSQHTNGIFEQGTFLHLVCKYYKQRQRARDSRLYIMPEYRYDKKLDKYNNTGRFDDDNQLLTYCNHKPRQKRYQLLNDLAGVLQVSPNFLKDKIGSDDDLFISKWLVEHIRGFKKACEDSLKIQKDNRGLLNHKINIARNTKGKCEKEIFNLICKIEGSEDKKGNYKHGLAYELGVLLFGEPNEASKPEFDRKIKKFNSIYSFAQIQQIAFAERKGNANTCAVCSADNAHRMQQIKITEPVEDNKDKIILSAKAQRLPAIPTRIVDGAVKKMATILAKNIVDDNWQNIKQVLSAKHQLHIPIITESNAFEFEPALADVKGKSLKDRRKKALERISPENIFKDKNNRIKEFAKGISAYSGANLTDGDFDGAKEELDHIIPRSHKKYGTLNDEANLICVTRDDNKNKGNRIFCLHDLANNYKLKQFETTDDLEIEKKIADTIWDASKKDFKFGNYRSFINLTPQEQKAFRHALFLADENPIKQAVIRAINNRNRTFVNGTQRYFAEVLANNIYLRAKKENLNTDKISFDYFGIPTIGNGRGIAEIRQLYEKVDSDIQVYAKGDKPQASYSHLIDAMLAFCIAADEHRNDGSIGLEIDKNYSLYPLDKNTGEVFTKDIFSQIKITDNEFSDKKLVRKKATEGFNTHRQMTRDGIYAENYLPILIHKELDEVRKGYTWKNSEEIKIFKGKKYDIQQLNNLLYCLKFVDKPISIDIQISTLEELRNILTTNNIAATAEYYYINLKTQKLHEYYIENYNTALGYKKYTKEMEFLRSLAYRSERVKIKSIDDVKQVLDKDSNFIIGKITLPFKKEWQRLYREWQNTTIKDDYEFLKSFFNVKSITKLHKKVRKDFSLPISTNEGKFLVKRKTWDNNFIYQILNDSDSRVDGTKPFIPAFDISKNEIVEAIIDSFTSKNIFWLPKNIELQKVDNKNIFAIDTSKWFEVETPSDLRDIGVATIQYKIDNNSRPKVRVKLDYVIDDDSKINYFTNHSLLKSRYPDKVLEILKQSTIIEFESSGFNKTIKEMLGMTLAGIYNETSNN

SEQ ID NO: 434 - protein, 1629 aa, Francisella novicida
MNFKILPIAIDLGVKNTGVFSAFYQKGTSLERLDNKNGKVYELSKDSYTLLMNNRTARRHQRRGIDRKQLVKRLFKLIWTEQLNLEWDKDTQQAISFLFNRRGFSFITDGYSPEYLNIVPEQVKAILMDIFDDYNGEDDLDSYLKLATEQESKISEIYNKLMQKILEFKLMKLCTDIKDDKVSTKTLKEITSYEFELLADYLANYSESLKTQKFSYTDKQGNLKELSYYHHDKYNIQEFLKRHATINDRILDTLLTDDLDIWNFNFEKFDFDKNEEKLQNQEDKDHIQAHLHHFVFAVNKIKSEMASGGRHRSQYFQEITNVLDENNHQEGYLKNFCENLHNKKYSNLSVKNLVNLIGNLSNLELKPLRKYFNDKIHAKADHWDEQKFTETYCHWILGEWRVGVKDQDKKDGAKYSYKDLCNELKQKVTKAGLVDFLLELDPCRTIPPYLDNNNRKPPKCQSLILNPKFLDNQYPNWQQYLQELKKLQSIQNYLDSFETDLKVLKSSKDQPYFVEYKSSNQQIASGQRDYKDLDARILQFIFDRVKASDELLLNEIYFQAKKLKQKASSELEKLESSKKLDEVIANSQLSQILKSQHTNGIFEQGTFLHLVCKYYKQRQRARDSRLYIMPEYRYDKKLHKYNNTGRFDDDNQLLTYCNHKPRQKRYQLLNDLAGVLQVSPNFLKDKIGSDDDLFISKWLVEHIRGFKKACEDSLKIQKDNRGLLNHKINIARNTKGKCEKEIFNLICKIEGSEDKKGNYKHGLAYELGVLLFGEPNEASKPEFDRKIKKFNSIYSFAQIQQIAFAERKGNANTCAVCSADNAHRMQQIKITEPVEDNKDKIILSAKAQRLPAIPTRIVDGAVKKMATILAKNIVDDNWQNIKQVLSAKHQLHIPIITESNAFEFEPALADVKGKSLKDRRKKALERISPENIFKDKNNRIKEFAKGISAYSGANLTDGDFDGAKEELDHIIPRSHKKYGTLNDEANLICVTRGDNKNKGNRIFCLRDLADNYKLKQFETTDDLEIEKKIADTIWDANKKDFKFGNYRSFINLTPQEQKAFRHALFLADENPIKQAVIRAINNRNRTFVNGTQRYFAEVLANNIYLRAKKENLNTDKISFDYFGIPTIGNGRGIAEIRQLYEKVDSDIQAYAKGDKPQASYSHLIDAMLAFCIAADEHRNDGSIGLEIDKNYSLYPLDKNTGEVFTKDIFSQIKITDNEFSDKKLVRKKAIEGFNTHRQMTRDGIYAENYLPILIHKELNEVRKGYTWKNSEEIKIFKGKKYDIQQLNNLVYCLKFVDKPISIDIQISTLEELRNILTTNNIAATAEYYYINLKTQKLHEYYIENYNTALGYKKYSKEMEFLRSLAYRSERVKIKSIDDVKQVLDKDSNFIIGKITLPFKKEWQRLYREWQNTTIKDDYEFLKSFFNVKSITKLHKKVRKDFSLPISTNEGKFLVKRKTWDNNFIYQILNDSDSRVDGTKPFIPAFDISKNEIVEAIIDSFTSKNIFWLPKNIELQKVDNKNIFAIDTSKWFEVETPSDLRDIGVATIQYKIDNNSRPKVRVKLDYVIDDDSKINYFTNHSLLKSRYPDKVLEILKQSTTIEFESSGFNKTIKEMLGMTLAGIYNETSNN

SEQ ID NO: 435 - protein, 244 aa, Francisella tularensis
ARKQNSEIYNKLMQKILEFKLRKLCTDIKDDKVSTKTLKEITSYEFELLADYLANYSESLKTQKFSYTDKQGNLKELSYYHHDKYNIQEFLKRHATINDEILDTLLTDDFDIWNFNFEKFDFDKNEEKLQNQEDKDHTQAYLHHFVFAVNKIKSEMASGGRHRSQYFQEITNVLDENNHQEGYLKNFCENLHNKKYSNLSVKNLVNLVGNLSNLELKPLRKYFNDKNLIIGMSKSLQKLIATGY

SEQ ID NO: 436 - protein, 501 aa, Francisella tularensis
MEIEKKIADTIWDASKQDFKFGNYRSFINLTPQEQKAFRYALFLADENSIKQAVIRAINNRNRTFVNGTQRYFAEVLANNIYLRAKKENLNTDKISFDYFGIPTIGNGRGIADIRQLYEKVDSDIQAYAKGDKPQASYSHLIDAMIAFCVAADEHRNDGSIGLEIDKNYSLYLLDKNTGEVFTKDIFSQIKITDNEFSDKKLVRKKATEGFNTHRQMTRDGIYAENYLPILIHKELDEVRKGYTWGNSEELKIHKGKKYNIQQLNNIVYCLKFIDKSISIDIQISTLEELRNILTTNNIAATAEYYYINLKNQKLHEYYIENYNTALDYKKYSKEMEFLRSLAYRSERVKIKSIDDVKQVLDKDSNFIIGKITLPFKKEWQRLYLEWQNTTIKDDYEFLKSFFNVKSITKLHKKVRKDFSLPISTNEGKFLVKRKTWDNNFIYQILNDSDSRVDGTKPFIPAFDISKNEIVEAIIDSFTSKNIFWLPKNIELQNVDKIFLL

SEQ ID NO: 437 - protein, 158 aa, Francisella tularensis
MIDFLLELDPCITIPPYLDNNNRKPPKCQSLILNPKFLDNQYPNWQQYLQELKKLQSIQDYLDSFETDLKDLKSSKDQPYFVEYKSSNQQMASGQRDYKDLDARILQFIFDRVKASDELLLNEIYFQAKKLKQKASSELEKLESSKKLDEVIANSQLS

SEQ ID NO: 438 - protein, 878 aa, Francisella tularensis
MLNDLAGVLQVSRNQLLSSVEEWFQQAQRVGEISKSQDEQIFEWLKSFKIASYCKAAVEMQKQYRGTLKNAIQTAIFRQSENINKNKNKNKNTGNQQQALSENSKDVKSLTADEKKLLKLIENIAKASQKIGESLGLNDKQIKKFNSIYNFAQIQQIAFAERKGNANTCAVYSADNAHRMQQIKITELVEDNKDNIILSAKAQRLPAIPTRIVDGAVKKMATILAKNIVDDNWQNIKQVLSAKHQLHIPIITESNAFEFEPALADVKGKSLKDRRKKALERISPENIFKDKNNRIKEFAKGISAYSGANLTDGDFDGAKEELDHIIPRSYKKYGTLNDEVNLICVTRDDNKNKGKRIFCLNDLANNYKLKQFETTDDLEIEKKIADTIWDASKQDFKFGNYRSFINLIPQEQKAFRYALFLADENSIKQAVIRAINNRNRTFVNGTQRYFAEVLANNIYLRAKKENLNTDKISFDYFGIPTIGNGRGIADIRQLYEKVDSDIQAYAKGDKPQASYSHLIDAMIAFCVAADEHRNDGSIGLEIDKNYSLYPLDKNTGEVFTKDIFSQIKITDNEFSDKKLVRKKATEGFNTHRQMTRDGIYAENYLPILIHKELDEVRKGYTWGNSEELKIHKGKKYNIQQLNNIVYCLKFIDKSISIDIQISTLEELRNILTTNNIAATAEYYYINLKNQKLHEYYIENYNTALDYKKYSKEMEFLRSLAYRSERVKIKSIDDVKQVLDKDSNFIIGKITLPFKKEWQRLYLEWQNTTIKDDYEFLKSFFNVKSINKLHKKVRKDFSLPISTNEGKFLVKRKTWDNNFIYQILNDSDSRVDGTKPFIPAFDISKNEIVEAIIDSFTSKNIFWLPKNIELQKVDKIFLL

SEQ ID NO: 439 - protein, 292 aa, Francisella tularensis
MLNDLAGVLQVSRNQLLSSVEEWFQQAQRVGEISKSQDEQIFEWLKSFKIASYCKAAVEMQKQYRGTLKNAIQTAIFRQSENINKNKNKNTGNQQQALSENSKDVKSLTADEKKLLKLIENIAKASQKIGESLGLNDKQIKKFNSIYNFAQIQQIAFAERKGNANTCAVYSADNAHRMQQIKITELVEDNKDNIILSAKAQRLPAIPTRIVDGAVKKMVTILAKNIVDDNWQNIKQVLSAKHQLHIPIITESNAFEFEPALADVKGKSLKDRRKKALERISPENIFKDKNIC

SEQ ID NO: 440 - protein, 53 aa, Francisella tularensis
MNHSLLKSRYPDKVLEILKQSTIIEFESSGFNKTIKEMLGMTLAGIYNETSNN

SEQ ID NO: 441 - protein, 393 aa, Francisella tularensis
MNVKILPIAIDLDVKNTGVFSAFYQKGTSLEKLDNKNGKVYELSKDSYTLLMNNRTAQRHQRRGIDRKQLVKRLFKLVWTEQLNLEWDKDTQQAISFLFNRRGFSFITDGYSTEYLNIVPEQVKAILMDIFDDYNGEDDLDSYLKLATEQESKISEIYNKLMQKILEFKLRKLCTDIKDDKVSTKTLKEITSYEFELLADYLANYSESLKTQKFSYTDKQGNLKELSYYHHDKYNIQEFLKRHATINDEILDTLLTDDFDIWNFNFEKFDFDKNEEKLQNQEDKDHTQAYLHHFVFAVNKIKSEMASGGRHRSQYFQEITNVLDENNHQEGYLKNFCENLHNKKYSNLSVKNLVNLVGNLSNLELKPLRKYFNDKNLIIGMSKSLQKLIATGY

SEQ ID NO: 442 - protein, 1629 aa, Francisella tularensis
MNVKILPIAIDLGVKNTGVFSAFYQKGTSLERLDNKNGKVYELSKDSYTLLMNNRTARRHQRRGIDRKQLVKRLFKLIWTEQLNLEWDKDTQQAISFLFNRRGFSFITDGYSPEYLNIVPEQVKAILMDIFDDYNGEDDLDSYLKLATEQESKISEIYNKLMQKILEFKLRKLCTDIKDDKVSTKTLKEITSYEFELLADYLANYSEILKTQKFSYTDKQGNLKELSYYHHDKYNIQEFLKRHATINDEILDTLLTDDLDIWNFNFEKFDFDKNEEKLQNQEDKDHTQAHLHHFVFAVNKIKSEMASGGRHRGQYFQEITNVLDENNHQEGYLKNFCENLHNKKYSNLSVKNLVNLIGNLSNLELKPLRKYFNDKIHAKADHWDEQKFTETYCHWILGEWRVGVKDQDKKDGAKYSYKDLCNELKQKVTKAGLVDFLLELDPCRTIPPYLDNNNRKPPKCQSLILNPKFLDNQYPNWQQYLQELKKLQSIQNYLESFETDLKVLKSSKDQPYFVEYKSSNQQIASGQRDYKDLDARILQFIFDRVKASDELLLNEIYFQAKKLKQKASSELEKLESSKKLDEVIANSQLSQILKSQHTNGIFEQGTFLHLVCKYYKQRQRARDSRLYIMPEYRYDKKLDKYNNTGRFDDDNQLLTYCNHKPRQKRYQLLNDLAGVLQVSPNFLKDKIGSDDDLFISKWLVEHIRGFKKACEDSLKIQKDNRGLLNHKINIARNTKGKCEKEIFNLICKIEGSEDKKGNYKHGLAYELGVLLFGEPNEASKPEFDRKIKKFNSIYSFAQIQQIAFAERKGNANTCAVCSADNAHRMQQIKITEPVEDNKDKIILSAKAQRLPAIPTRIVDGAVKKMATILAKNIVDDNWQNIKQVLSAKHQLHIPIITESNAFEFEPALADVKGKSIKDRRKKALERISPENIFKDKNNRIKEFAKGISAYSGDNLASGDFDGAKEELDHIIPRSHKKYGTLNDEANLICVTRDDNKNKGNRIFCLHDLANNYKLKQFETTDDLEIEKKIADTIWDASKKDFKFGNYRSFINLTPQEQKAFRHALFLADENPIKQAVIRAINNRNRTFVNGTQRYFAEVLANNIYLRAKKENLNTDKISFDYFGIPTIGNGRGIVEIRQLYEKVDSDIQAYAKGDKPQASYSHLIDAMLAFCIAADEHRNDGSIGLEIDKNYSLYPLDKNTGEVFTKDIFSQIKITNNEFSDKKLVRKKATEGFNTHRQMTRDGIYAENYLPILIHKELDEVRKGYTWGNSEELKIHKGKKYDIQQLNNLVYCLKFIDKSISIDIQISTLEELRNILTTNNIATTAEYYYINLKTQKLHEYYIENYNTALGYKKYTKEMEFLRSLAYRSERVKIKSIDDVKQVLDKDSNFIIGKITLPFKKEWQRLYREWQNTTIKDDYEFLKSFFNVKSITKLHKKVRKDFSLPISTNEGKFLVKRKTWDNNFIYQILNDSDSRVDGTKPFIPAFDISKNEIVEAIIDSFTSKNIFWLPKNIELQKVDNKNIFAIDTSKWFEVETPSDLRDIGVATIQYKIDNNSRPKVRVKLDYVIDDDSKINYFTNHSLLKSRYPDKVLEILKQSTIIEFESSGFNKTIKEMLGMTLAGIYNETSNN

SEQ ID NO: 443 - protein, 285 aa, Francisella tularensis
MTRDGIYAENYLPILIHKELDEVRKGYTWGNSEELKIHKGKKYNIQQLNNIVYCLKFIDKSISIDIQISTLEELRNILTTNNIAATAEYYYINLKNQKLHEYYIENYNTALDYKKYSKEMEFLRSLAYRSERVKIKSIDDVKQVLDKDSNFIIGKITLPFKKEWQRLYLEWQNTTIKDDYEFLKSFFNVKSITKLHKKVRKDFSLPISTNEGKFLVKRKTWDNNFIYQILNDSDSRVDGTKPFIPAFDISKNEIVEAIIDSFTSKNIFWLPKNIELQKVDKIFLL

SEQ ID NO: 444 - protein, 1323 aa, Fructobacillus fructosus
MVYDVGLDIGTGSVGWVALDENGKLARAKGKNLVGVRLFDTAQTAADRRGFRTTRRRLSRRKWRLRLLDELFSAEINEIDSSFFQRLKYSYVHPKDEENKAHYYGGYLFPTEEETKKFHRSYPTIYHLRQELMAQPNKRFDIREIYLAIHHLVKYRGHFLSSQEKITIGSTYNPEDLANAIEVYADEKGLSWELNNPEQLTEIISGEAGYGLNKSMKADEALKLFEFDNNQDKVAIKTLLAGLTGNQIDFAKLFGKDISDKDEAKLWKLKLDDEALEEKSQTILSQLTDEEIELFHAVVQAYDGFVLIGLLNGADSVSAAMVQLYDQHREDRKLLKSLAQKAGLKHKRFSEIYEQLALATDEATIKNGISTARELVEESNLSKEVKEDTLRRLDENEFLPKQRTKANSVIPHQLHLAELQKILQNQGQYYPFLLDTFEKEDGQDNKIEELLRFRIPYYVGPLVTKKDVEHAGGDADNHWVERNEGFEKSRVTPWNFDKVFNRDKAARDFIERLTGNDTYLIGEKTLPQNSLRYQLFTVLNELNNVRVNGKKFDSKTKADLINDLFKARKTVSLSALKDYLKAQGKGDVTITGLADESKFNSSLSSYNDLKKTFDAEYLENEDNQETLEKIIEIQTVFEDSKIASRELSKLPLDDDQVKKLSQTHYTGWGRLSEKLLDSKIIDERGQKVSILDKLKSTSQNFMSIINNDKYGVQAWITEQNTGSSKLTFDEKVNELTTSPANKRGIKQSFAVLNDIKKAMKEEPRRVYLEFAREDQTSVRSVPRYNQLKEKYQSKSLSEEAKVLKKTLDGNKNKMSDDRYFLYFQQQGKDMYTGRPINFERLSQDYDIDHIIPQAFTKDDSLDNRVLVSRPENARKSDSFAYTDEVQKQDGSLWTSLLKSGFINRKKYERLTKAGKYLDGQKTGFIARQLVETRQIIKNVASLIEGEYENSKAVAIRSEITADMRLLVGIKKHREINSFHHAFDALLITAAGQYMQNRYPDRDSTNVYNEFDRYTNDYLKNLRQLSSRDEVRRLKSFGFVVGTMRKGNEDWSEENTSYLRKVMMFKNILTTKKTEKDRGPLNKETIFSPKSGKKLIPLNSKRSDTALYGGYSNVYSAYMTLVRANGKNLLIKIPISIANQIEVGNLKINDYIVNNPAIKKFEKILISKLPLGQLVNEDGNLIYLASNEYRHNAKQLWLSTTDADKIASISENSSDEELLEAYDILTSENVKNRFPFFKKDIDKLSQVRDEFLDSDKRIAVIQTILRGLQIDAAYQAPVKIISKKVSDWHKLQQSGGIKLSDNSEMIYQSATGIFETRVKISDLL

SEQ ID NO: 445 - protein, 1367 aa, Fusobacterium sp.
MKKQKFSDYYLGFDIGTNSVGWCVTDLDYNVLRFNKKDMWGSRLFDEAKTAAERRVQRNSRRRLKRRKWRLNLLEEIFSDEIMKIDSNFFRRLKESSLWLEDKNSKEKFTLFNDDNYKDYDFYKQYPTIFHLRDELIKNPEKKDIRLIYLALHSIFKSRGHFLFEGQNLKEIKNFETLYNNLISFLEDNGINKSIDKDNIKKLEKIICDSGKGLKDKEKEFKEIFNSDKQLVAIFKLSVGSSVSLNDLFDTDEYKKEEVEKEKISFREQIYEDDKPIYYSILGEKIELLDIAKSFYDFMVLNNILSDSNYISEAKVKLYEEHKKDLKNLKYIIRKYNKENYDKLFKDKNENNYPAYIGLNKEKGKKEVVEKSGLKIDDLIKVIKGYLPKPERIEEKDKTIFNEILNKIELKTILPKQRISDNGTLPYQIHEVELEKILENQSKYYDFLNYEENGVSTKDKLLKTFKFRIPYYVGPLNSYHKDKGGNSWIVRKEEGKILPWNFEQKVDIEKSAEEFIKRMTNKCTYLNGEDVIPKDSFLYSEYIILNELNKVQVNDEFLNEENKRKIIDELFKENKKVSEKKFKEYLLVNQIANRTVELKGIKDSFNSNYVSYIKFKDIFGEKLNLDIYKEISEKSILWKCLYGDDKKIFEKKIKNEYGDILNKDEIKKINSFKFNTWGRLSEKLLTGIEFINLETGECYSSVMEALRRTNYNLMELLSSKFTLQESIDNGNKEMNEVSYRDLIEESYVSPSLKRAILQTLKIYEEIKKITGRVPKKVFIEMARGGDETMKNKKIPARQEQLKKLYDSCGNDIANFSIDIKKMKSSLSSYDNNSLRQKKLYLYYLQFGKCMYTGREIDLDRLLQNNDTYDIDHIYPRSKVIKDDSFDNLVLVLKNENAEKSNEYPVKKEIQEKMKSFWRFLKEKNFISDEKYKRLTGKDDFELRGFMARQLVNVRQTTKEVGKILQQIEPEIKIVYSKAEIASSFREMFDFIKVRELNDTHHAKDAYLNIVAGNVYNTKFTEKPYRYLQEIKENYDVKKIYNYDIKNAWDKENSLEIVKKNMKKNTVNITRFIKEEKGQLFDLNPIKKGETSNEIISIKPKLYNGKEEKLNEKYGYYKSLNPAYFLYVEHKEKNKRIKSFERVNLVDVNNIKDEKSLVKYLIENKKLVEPRLIKKVYKRQVILINDYPYSIVALDSNKLMDFENLKPLFLENKYEKILKNVIKFLEDNQGKSEENYKFIYLKKKDRYEKNETLESVKDRYNLEFNEMYDKFLEKLDSKDYKNYINNKKYKNLLDVKEKFIKLNLFDKAFTLKSFLDLFNRKTMADFSKVGLTKYLGKIQKISSNVLSKNELYLLEESVTGLFVKKIKL

SEQ ID NO: 446 - protein, 1367 aa, Fusobacterium sp.
MKKQKFSDYYLGFDIGTNSVGWCVTDLDYNVLRFNKKDMWGSRLFDEAKTAAERRVQRNSRRRLKRRKWRLNLLEEIFSDEIMKIDSNFFRRLKESSLWLEDKNSKEKFTLFNDDNYKDYDFYKQYPTIFHLRDELIKNPEKKDIRLIYLALHSIFKSRGHFLFEGQNLKEIKNFETLYNNLISFLEDNGINKSIDKDNIKKLEKIICDSGKGLKDKEKEFKEIFNSDKQLVAIFKLSVGSSVSLNDLFDTDEYKKEEVEKEKISFREQIYEDDKPIYYSILGEKIELLDIAKSFYDFMVLNNILSDSNYISEAKVKLYEEHKKDLKNLKYIIRKYNKENYDKLFKDKNENNYPAYIGLNKEKGKKEVVEKSGLKIDDLIKVIKGYLPKPERIEEKDKIIFNEILNKIELKTILPKQRISDNGTLPYQIHEVELEKILENQSKYYDFLNYEENGVSTKDKLLKTFKFRIPYYVGPLNSYHKDKGGNSWIVRKEEGKILPWNFEQKVDIEKSAEEFIKRMTNKCTYLNGEDVIPKDSFLYSEYIILNELNKVQVNDEFLNEENKRKIIDELFKENKKVSEKKFKEYLLVNQIANRTVELKGIKDSFNSNYVSYIKFKDIFGEKLNLDIYKEISEKSILWKCLYGDDKKIFEKKIKNEYGDILNKDEIKKINSFKFNTWGRLSEKLLTGIEFINLETGECYSSVMEALRRTNYNLMELLSSKFTLQESIDNGNKEMNEVSYRDLIEESYVSPSLKRAILQTLKIYEEIKKITGRVPKKVFIEMARGGDETMKNKKIPARQEQLKKLYDSCGNDIANFSIDIKKMKSSLSSYDNNSLRQKKLYLYYLQFGKCMYTGREIDLDRLLQNNDTYDIDHIYPRSKVIKDDSFDNLVLVLKNENAEKSNEYPVKKEIQEKMKSFWRFLKEKNFISDEKYKRLTGKDDFELRGFMARQLVNVRQTTKEVGKILQQIEPEIKIVYSKAEIASSFREMFDFIKVRELNDTHHAKDAYLNIVAGNVYNTKFTEKPYRYLQEIKENYDVKKIYNYDIKNAWDKENSLEIVKKNMKKNTVNITRFIKEEKGQLFDLNPIKKGETSNEIISIKPKLYNGKEEKLNEKYGYYKSLNPAYFLYVEHKEKNKRIKSFERVNLVDVNNIKDEKSLVKYLIENKKLVEPRLIKKVYKRQVILINDYPYSIVALDSNKLMDFENLKPLFLENKYEKILKNVIKFLEDNQGKSEENYKFIYLKKKDRYEKNETLESVKDRYNLEFNEMYDKFLEKLDSKDYKNYINNKKYKNLLDVKEKFIKLNLFDKAFTLKSFLDLFNRKTMADFSKVGLTKYLGKIQKISSNVLSKNELYLLEESVTGLFVKKIKL

SEQ ID NO: 447 - protein, 1367 aa, Fusobacterium sp.
MKKQQFSDYYLGFDIGTNSVGWCVTDFNYNVLRFNKKDMWGSRLFDEAKTAAERRVQRNSRRRLKRRKWRLNLLEEIFSDEILKIDSNFFRRLKESSLWLEDKSSKEKFTLFNDDNYKDYDFYKQYPTIFHLRNELIKNPEKKDIRLVYLALHSIFKSRGHFLFEGQNLKDIKNFETLYNNLMAFLEDNDIYKNIDSSYIGNLENIICDSKKGLKDKEKEFKEIFNSDKQLVGFFKLSVGSSVSLNDLFDTDEYKKGEVEKEKISFREQIYEDDKPIYYSILGEKIEFLDIAKSFYDFMVLNNILADSQYISEAKVKLYDEHKRDLKNLKYIIRKYNKENYDKLFKDKNESNYSAYIGLNKEKGKKEVIEKSRLKIDDFAKIIKGYLPKAEKIDEKDRSIFNEILDKIELKTILPKQRISDNGTLPYQIHEAELEKILENQAKYYDFLNHEENGISTKDKLLMTFKFRIPYYVGPLNSYHKNKGGNSWIVRKEEGKILPWNFEQKVDIEKSAEEFIKRMTNKCTYLNGEDVIPKDSFLYSEYIILNELNKVQVNDEFLNKEIKKKIIEDLFKKSKKISEKNFREYLLVNQITNKTVELKGVKDAFNSNYVSYIKFKDIFGDKLNLDIYKEISEKSILWKCLYGDDKKIFEKKIKSVYGDILTKDEIKKINSFKFNTWGRLSEKLLTEIEFIDLETGECYSSVMDALRRTNYNLMELLSSKFTLQENIDNENKEVSEFSYRDLVEESYVSPSLKRAILQTLKIYEEIRKITGRIPKKVFIEMARGGDETMKNKKIPARQEQLKKLYDSCGKDISNFSIDIKEMKNSLNSYDNNSLRQKKLYLYYLQFGKCMYTGKEIDLNRLLQNNDTYDIDHIYPRSKVIKDDSFDNLVLVLKNENAEKSNEYPLKKEIQEKMKSFWKFLKEKNFISDEKYKRLTGKDEFELRGFMARQLVNVRQTTKEAGKILQQIEPEIKIVYSKAEIASSFREMFDFIKVRELNDTHHAKDAYLNIVAGNVYNTKFTEKPYRYLQEIKENYDVKKIYNYDIKNAWDKEKSLEIVKKNMEKNTVNITRFIKEEKGQLFDLNPIRKGETSNEIIAIKPKFYEGSTEKLNEKYGYYKSLNPAYFIYVEHKEKNKIIRSFERVNLVDVNKIKDEKSLIKYLIENKGLIEPKVIKKVYKRQVILINNFPYSIVALDSNKLMDFENLKPLFLERKYEKILKNAIKFLEDNQGKTEEYYKFLYLKKKDRNEKNETIDSVKERYNIEFNEMYDKFLEKLDSKDYKNYINNKKYSELVNVKEKFIKLNLFDKAFTLKSFLDLFNRKTMADFSKVGLTKYLGKIQKISSNVLSKNELHLLEESVTGLFVKKIKL

SEQ ID NO: 448 - protein, 1391 aa, Galbibacter sp.
MKTILGLDLGTNSIGWALVKEAENENEVSDIIKLGVRVNPLTVDELTNFEGGKAYSNNAERTLKRGARRNLQRYKLRRENLIEILLKNGLINKDTALTEVGKETTHQTLKLRSKSANEKVSLEDLAKILLSINKKRGYKSSRKVNAEDDGVAIDGMEVAKLLYDENMTPGEYVLRLLESGKKHLPDFYRSDLQEEFNLVWKKQSEFYPLILTKELFFELHGKNKSQTWAICKEPLGIVGVKLKGSAKEQKFARYRLRKEALTQQIELEHLAIVLQDINNDSNKSSGYLGAISDRSKELFFNKETVGQYQYKQLQKDPNTSLKNQVFYRQDYLDEFEVIWRNQAKFYPQLTNELKQEIRDVVIFYQRKLKSQKNLISFCQFESTQQNYVEKETGKTKIRTIGRRVIPRSSPLFQEFKIWQSLNNLKFVNSESNQIIQFIELEDDVKKVVFDELNLRGDLKPNQVLKILSKYMKIGKLTQWKCNLEEIEGNRTNSALYNVFQMIAEEEGYGFNWGKKSALEIKSELKAIFSSIGINDSILDFDFSKKLDQQLSYQLWHLLYSAEEGNSKITEEDKFTYGNTGVALKKKLHLKFGFKPEYSTLISNLRFTSDYGNLSSKAISKILPFLRDGSDYSKACQYAGYNHSNSLSADELDNRELKPKLELLKKNSLRNPVVEKILNQMVNVVNQVIDNYGKPDEVRIELARELKKSAKERSQMTKNISDATRRNAEIKKYLSKEFGIPNPTKGDVIRYRLWEELASNGYKDLFRDKYIPKEKLFSNEIDIEHIIPKALLFDDSFSNKTLAFKVDNLKKADRTAFDFMSTDFSKDVDSYIGRIETLHKDGKISSSKYKKLMIPKSKLVDGFIERDLRNTQYIAKQARKMLLEVFKTVVPTTGKITDKLREDWDLINVMKELNFPKYKALGLTKKIERFDVGSEKIKSINVIEGWSKRNDHRHHAMDALAVAFTTHNHIQYLNYLNARKDIHHEMHGTIKSIENQIIGKDVMGKRRFIPPISDLRMKAKLQIESILISFKNKNKVVTWSVNKTKLKGKDNYNKRRQLTPRGQLHKETVYGKIKLIDPKPLKLNNKFTLVRASMIVDKVHREIVLQHLSKYDNNSEVAFDSKTIKIDPILIEGIGLKEVVCYEDVFKIRKKISGDNFKNEKHLEKVIDEKVKQILKDRVIKFQGNFKEAFSNLEENPIWLNKSKGIAVKSVAIKGVNNAESLHEGKDHFGDQILDKNKKQIPVDFVSTGNNHHVGIYEDKDGNLQERVVSFFEAVTRVNEGLPIIDKTYNSDIGWKFKFTMKQNEMFVFPSDDFDPNEFDLTDGKNAAKISPNLYRVQKIATKNYMFRHHLETVVTNDLEFTYKSIRSTGWLRNLVKVRINHLGEIVYVGEY

SEQ ID NO: 449 - protein, 1186 aa, Gardnerella vaginalis
MEGNISYAIGIDVGLNSVGLAAIRLDDYGEPIRILKAMSVIHDAGIDPNGAKESDTRKAISGVARRVRRLYRQRRRRLQKLDFLLQSLGWPVVENKDLDFSDSFIPWIFRAKLADEYIADEEQRKQMLSVAIRHIARHRGWRNPYQSIKSMMQETEYSEFYNELLKNIEKLAPGVGCEGSTPAQLVRDYLLSQQGKASRRLRITTGGRRKNHPHSLDPVLPRKLMQSDNMLEILNIFNVQHIDDKYVREQIINAVFYAESPRGSAENRVGKDAITGKGKRALKASLAFQKYRIISTISNLRIRENSKERCLTIEEKQNVYKLLTTSIDKSSKRKSAEAPLYTWIDVADCLGIERYKLRGVGSQIGDGESVGNRPPMLNSELAILYANNKSLGQSLITWWLASNRTQEDKEALIEILSNTVDIEAIHDNPEYQDKYGSAIAFIDSMNETEIAALENISLPDGRAAYSLETLDELNKQMLETDDDLFEARKKLFNLPNNWRPAEAPIAEPTGNPSVDRVLKIVHRFLISAKNRWGNPERINIEHVRSGFQSKKMANSYKELLDKRTEGKENLKAMMRNSLHLGTSDSISDADIRRYEAVQRQNGQCLYCGSEITYHTCELDHIVPRKGPGSTNTRENLVATCSSCNAQKCNTPFATWCEQSTYCKNHDISADSAINRVRAFIFPPNSYDKRGANQFKKEVIARLKQKVGDEAFDNRSIESVAWMANELHRRIDWYYNSQNYQTNNGISDISNKAQTNVGVYAGSLTAIARRMSGIDGKLEFFDGRRKTRFDRRHHAVDASVIAMMTPGIAQILAIKCNLRETQLLQGNKVVPGGIDWKEYPTANDQGYQQYANWSVRMNALLKLLNEEMRADRIAVVNSIRLRYSNSSVHQYEVNALLKLHVGDEIDSETIRRSSTPALYCALTRNPDYDVNNGFPENPGRTILLHNKKLNADDSITFFKAQAVQLFVREGSAKIGNSIHHLRIYEYFEKLKSGKIKKSYGMIRVFQNDLHRHIHEDLFSCDLPEQSISMRYADTKVAHAVQTGNANYLGYLVPGDEIIVDFSHITLSENIGKFVEFLNKIGADCTAYRHWVVVGTDTEKVLILKPSMISSEGIDKLYSNCERNNFDYSSYEKSINEILAGKGWRVSVNVLAQYKAATIRRNALGEVRWASRSHLPISWSWDTGENRE

SEQ ID NO: 450 - protein, 1186 aa, Gardnerella vaginalis
MEGNISYAIGIDVGLNSVGLAAIRLDNNGEPIRILKAMSVIHDAGIDPNGAKESDTRKAISGVARRVRRLYRQRRRRLQKLDFLLHSLGFPVVENKDLDFSDSFIPWIFRAKLADEYIADEKQRKQMLSVAIRHIARHRGWRNPYQSIKSMTQETEYSEFYNELLKNIEKFAPGVGCEGSTPAQLVRDYLLLQQGKASRRLRITTDEKRKNHPNSLNPILPRKLMQSDNMLEILNIFNVQHIDDKYVREQIINAVFYAKSPRGSAENRVGKDAITGKGKRALKASLAFQKYRIISTISNLRIRENSKERCLTIEEKQSVYKLLTTSTDESSKEKSAEAPLYTWIDVADCLGIERYKLRGVGSQIGDGESVGNRPPMLNSELAIIYANNKSLGKSLLTWWLDANRTQEDKEALIEILSNTVDIEAIHDNPEYQDKYGSAIAFIDSMDETEIAALENISLPDGRAAYSLETLDKLNKQMLETDDDLFEARKKLFNLPNNWRPSEAPIAEPTGNPSVDRVLKIVHRFLISAKNRWGNPERINIEHVRSGFKSKKMANSYKELLDKRTKGKENLKAMMRNSLHLGMSDSISDADIRRYEAVQRQNGQCLYCGSEITYHTCELDHIVPRKGPGSTNTRENLVATCSLCNAQKCNTPFSTWCEQSTYCKNHDISVDSAINRVRAFIFPPNSYDKRGANQFKKEVIARLKQKVGDEAFDNRSIESVAWMANELHRRIDWYYNSQNYQTNNGISDITNKAQTNVGVYAGSLTAIARRMSGIDGKLEFFDGRRKTRFDRRHHAVDASVIAMMTPGIAQILAIKCNLRETQLLQGNKVVPGGIDWKEYPTANDQGYQQYANWSVRMNALLKLLNEEMRADRIAVVNSIRLRYNNSSVHQYKVNALLKLHVGDEIDSGTIRRSSTPALYCALTRNPDYDVNNGLPENPNRAILLHDKKLNADDSITFFKAQAVQLFVREGSAEIGSSTHHLRIYEYFKKLKSGKIKKSYGMIRVFQNDLHRHIHEDLFSCDLPEQSISMRYADTEVAHAVQTGNSNYLGYLVPGDEIIVDFSHVKLSGNIGTFVEFLNKIGANCAAYNHWVVVGTDTEKVLILKPSMISSEGIDKLYSNCKRNNFDYSSYEKSINEILVGKGWRVSVNVLAKYNAETIRRNALGEVRWTSRSHLPISWSWNTGENRE

SEQ ID NO: 451 - protein, 1258 aa, Gemella haemolysans
MTEENPDIRKVFLAIHHILKNRGHFLLQGQSFKEGNLNNLIKELLNLDILHISIEITEENINKITEIALEKKTLTDKVNDLKKIYPKEKQLLEAFRLIFGGKTSLDKLFAIDEYKELDASVKSVSFKEKIYEEVRHDYEQVLSNYIELLDLAKLVYDSIILSDIKKEGKTLSESKVELYHKHREDLTKLKTLVKNDSKLSEDKKVELYSAIFKEDKDKGTNYVNYIRKSEEGKGCNYEDFKKFLVKELAKLEESSAKEEILRDLELELFLPLQRTKDNSVVPYQIHKEELVKILDNAAKYHKFLNEKDDSGYSIIEKVIQLLEFRIPYYVGPLNSSKKAKVDGFAWSVRNKGYENTPVTPWNYEKVIDESASAEKFITNLTNKCTYLKGEDVLPKSSLLYSEFALLNELNALKYDGNRISLEARNVIIEKLFKEQGKKVTKTSIKNLLKAEGYIDGKGEITGIDITVKNDLKSYRDFKKILGDKFNTEHVENIILWITLYGESRKLIKAKIEAVYGDIYSKEEIAKMSRLVYKDWGRFSRKLLTELVSKKLYNEETGECLNIIGAMRQNNILFMELLADRFDYSQQIIDYNKELQKEVTEITPEILDDLYVSPSVKRSIWQTVRIVEELKKIIGCAPAKIFVETTRSNQDKKKPTDSRKKQLELFYKAVKKDVKDLEKEIGSLNFDKLNERLSSVEPSKLKAKKLYLYYTQLGRCMYSGETIDITQLNTTAYDIDHIYPQSKVKDDSFTNTVLVKREYNAAKTDRYPLGSDIQTPSNRRFWKFLKEKGLITDEKYNRLVRTEEFSDEELTGFIARQLVETSQSVKAVAGILGELNPKTSICYSKAENVSSFRQNFGKIKEGNRKSDNTEQLIKVREINDYHHAKDAYLNVVVGNVYDTKFTRNVFNFIKDKKDGRKYSLNNVFYENVSNSNNVAWELNKTVHQVEKVMNNNNILVTRRTSEQKGGLFDATVYKAKVAAKAKEGVYYPLKTSDPVVNDVTKYGGFTKVKIAYYSIFEYTLVNKKGEEKITRIIPIPIYVSQNIKDDSTLLEFGKTQINIKSGEEVKDFKLKYRKLCIGDLVKINNFFNFIGGKTNDSFVYDGAVQVTLDTESERYIKTLSKYQNWKKENKDGELWESITKEKNTELYNLLVEKMNSGIFIKKKPNKFNELNSEEIRNNFSSISLEEQAKVLLEVLNLLTNKKSIFDLKSINITAARGKISFNLSNLSQFSIIEQSVAGFYEKEITIIGDKENDMENNNC

SEQ ID NO: 452 - protein, 1054 aa, Haemophilus parainfluenzae
MENKNLNYILGLDLGIASVGWAVVEIDEKENPLRLIDVGVRTFERAEVPKTGESLALSRRLARSARRLTQRRVARLKKAKRLLKSENILLSTDERLPHQVWQLRVEGLDHKLERQEWAAVLLHLIKHRGYLSQRKNESKSENKELGALLSGVDNNHKLLQQATYRSPAELAVKKFEVEEGHIRNQQGAYTHTFSRLDLLAEMELLFSRQQHFGNPFASEKLLENLTALLMWQKPALSGEAILKMLGKCTFEDEYKAAKNTYSAERFVWITKLNNLRIQENGLERALNDNERLALMEQPYDKNRLFYSQVRSILKLSDEAIFKGLRYSGEDKKAIETKAVLMEMKAYHQIRKVLEGNNLKAEWAELKANPTLLDEIGTAFSLYKTDEDISAYLAGKLSQPVLNALLENLSFDKFIQLSLKALYKLLPLMQQGLRYDEACREIYGDHYGKKTEENHHFLPQIPADEIRNPVVLRTLTQARKVINGVVRLYGSPARIHIETGREVGKSYKDRRELEKRQEENRKQRENAIKEFKEYFPHFAGEPKAKDILKMRLYKQQNAKCLYSGKPIELHRLLEKGYVEVDHALPFSRTWDDSFNNKVLVLANENQNKGNLTPFEWLDGKHNSERWRAFKALVETSAFPYAKKQRILSQKLDEKGFIERNLNDTRYVARFLCNFIADNMHLTGEGKRKVFASNGQITALLRSRWGLAKSREDNDRHHALDAVVVACSTVAMQQKITRFVRFEAGDVFTGERIDRETGEIIPLHFPTPWQFFKQEVEIRIFSDNPKLELENRLPDRPQANHEFVQPLFVSRMPTRKMTGQGHMETVKSAKRLNEGISVIKMPLTKLKLKDLELMVNREREKDLYDTLKARLEAFNDDPAKAFAEPFIKKGGAIVKSVRVEQIQKSGVLVREGNGVADNASMVRVDVFTKGGKYFLVPIYTWQVAKGILPNKAATQYKDEEDWEVMDNSATFKFSLHPNDLVKLVTKKKTILGYFNGLNRATGNIDIKEHDLDKSKGKQGIFEGVGIKLALSFEKYQVDELGKNIRLCKPSKRQPVR

SEQ ID NO: 453 - protein, 1052 aa, Haemophilus parainfluenzae]
MKNTSLNYVLGLDLGISSVGWAVVEIDEKENPLSLIDVGVRTFERAETQKGESLALARRLARSARRLTQRRVARLKKAKRLLKSENILLSTDECLPHQVWQLRVEGLERKLERQEWAAVLLHLIKHRGYLSQRKNESKSENKELGALLSGVANNHKLLQQTTYRTPAELAVKKFEVEEGHIRNQQGSYTHTFSRLDLLSEMELLFSRQQHFGNPFTSEKLLENLTALLMWQKPALSGDAILKMLGKCTFENEYKAAKHTYSAERFIWITKLNNLRIQENGLERALNDNERLALMKQPYEKAKLTYAQVRSILNLSDEAIFKGLRYSGEDKKTSETKTVLMEMKAYHQIRLALEKNDLKTEWAELKVNSSLLDEIGTAFSLYKTDEDISTCLAGKLSQPVLNALLENLNFDKFIQLSLKALHKILPLMQQGLRYDEACAEIYGDHYGKKTEENHLLLPQIPADEIRNPVVLRTLTQARKVINGVVRLYSSPARIHIETGREVGKSYQDRRELEKRQEENRKQREKAISEIKTLFPNFSGEPKAKDILKMRLYYQQNAKCLYSGKPLELHRLLEQGYVEIDHALPFSRTWDDSFNNKVLVLANENQNKGNLTPFEWLDGKNNSERWKAFKALVETSAFPYTKKQRILSQKLDEKGFIERNLNDTRYVARFLCNFIADNMHLTGEGKRKVFASNGQITALLRGRWGLAKSREDNDRHHALDAVVVACSTVSMQQKITRFVRFEEGNVFTGERIDRETGEIIPLHFPAPWKFFREEVEIRIFSDNPKLELENRLIARPQANHEFVQPLFVSRMPTRKMIGQGHMETIKSAKRLNEGLSVIKMLLTKLRLKDLESMVNREREKELYEALKARLEAFNDEPAKAFAEPFMKKGGAIVKSVRVEQVQKSGVLVRDGNGVADNASMVRVDVFTKGGKYFLVPIYTWQVAKGILPNKAVIQGKNEEDWEVMDDATFRFSLHQNDLVKLVTKKKTIFGYFNGLNRATGNIDIKEHDLEKSKVKDGIHQSIGIKLALSFEKYQVDELGKNIRLCKSSKRQAVR

SEQ ID NO: 454 - protein, 121 aa, Haemophilus pittmaniae
MLNRRYAAKITRFVRFEAGDVFTGERIDRETGEIIPLHFPTPWQFFKQEVEIRIFSDNPKLELENRLPDRPQANHEFVQPLFVSRMPTRKMTGQGHMETVKSAKRLNEGISVIKMPLTKLN

SEQ ID NO: 455 - protein, 203 aa, Haemophilus pittmaniae
MVNREREKDLYDALKARLEAFNDDPAKAFAEPFIKKGGAIVKSVRVEQVQKSGVLVREGNGVADNASMVRVDVFTKDGKYFLVPIYTWQVAKGILPNKAATQYKDEEDWEVMDNSAIFKFSLHPNDLVKLVTKKKTILGYFNGLDRATGNIAIKEHDLEKSKAKGGIHQGVGIKLALSFEKYQIDELGKNIRLCNPSKCQSVR

SEQ ID NO: 456 - protein, 1052 aa, Haemophilus sputorum
MKNTSLNYVLGLDLGISSVGWAVVEIDEKENPLSLIDVGVRTFERAETQKGESLALARRLARSARRLTQRRVARLKKAKRLLKSENILLSTDECLPHQVWQLRVEGLERKLERQEWAAVLLHLIKHRGYLSQRKNESKSENKELGALLSGVANNHKLLQQTTYRTPAELAVKKFEVEEGHIRNQQGSYTHTFSRLDLLSEMELLFSRQQHFGNPFTSEKLLENLTALLMWQKPALSGDAILKMLGKCTFENEYKAAKHTYSAERFIWITKLNNLRIQENGLERALNDNERLALMKQPYEKAKLTYAQVRSILNLSDEAIFKGLRYSGEDKKTSETKTVLMEMKAYHQIRLALEKNDLKTEWAELKVNSSLLDEIGTAFSLYKTDEDISTCLAGKLSQPVLNALLENLNFDKFIQLSLKALHKILPLMQQGLRYDEACAEIYGDHYGKKTEENHLLLPQIPADEIRNPVVLRTLTQARKVINGVVRLYSSPARIHIETGREVGKSYQDRRELEKRQEENRKQREKAISEIKTLFPNFSGEPKAKDILKMRLYYQQNAKCLYSGKPLELHRLLEQGYVEIDHALPFSRTWDDSFNNKVLVLANENQNKGNLTPFEWLDGKNNSERWKAFKALVETSAFPYTKKQRILSQKLDEKGFIERNLNDTRYVARFLCNFIADNMHLTGEGKRKVFASNGQITALLRGRWGLAKSREDNDRHHALDAVVVACSTVSMQQKITRFVRFEEGNVFTGERIDRETGEIIPLHFPAPWKFFREEVEIRIFSDNPKLELENRLIARPQANHEFVQPLFVSRMPTRKMTGQGHMETIKSAKRLNEGLSVIKMLLTKLRLKDLESMVNREREKELYEALKARLEAFNDEPAKAFAEPFMKKGGAIVKSVRVEQVQKSGVLVRDGNGVADNASMVRVDVFTKGGKYFLVPIYTWQVAKGILPNKAVIQGKNEEDWEVMDDATFRFSLHQNDLVKLVTKKKTIFGYFNGLNRATGNIDIKEHDLEKSKVKDGIHQSIGIKLALSFEKYQVDELGKNIRLCKSSKRQAVR

SEQ ID NO: 457 - protein, 1338 aa, Helcococcus kunzii
MQDYYLGLDIGTNSVGWAVTDENYNLLRKKGKDLWGVRLFKEAQPATERRGHRSSRRRTIRKSLRKQLLRELFEEEINAIDKDFFLRLDESKYWLEDKKIEGKYSLFNDENFTDKDYYEKFPTIFHLRKALIESDDKEDIRLYFLAINQMMKRRGHFLIDGKLSNVEDITPFKECIQNLINEELDTEIETEFYDKAIKIVSDYSLKKTEKKNLIKDLVKETDSIEDSKKIINIFNLLISGKSKVNGIFDDEEILEKIKEDNKEDFYLTSEKYEENLEYFSQLLDYRFELISSLKSIYDYIILQEVLKGKKYLSYAQVERYKNHKEDLRKLKQLIKKYDKNGKIYYQIFRDENFKKGYVAYLGYYKKNKKNVPVKKCDYDTFSKNIKSTLDKICDKEDPLYIELIDKIEKGGFLLKQIVSTNSVIPHQVHELELDKILENLEKNYPSFKEISDGVSKIDKIKMIFNFRIPYYVGPLNDYHKDKVNSNTWIVKNEGFENENIRPWNFSKIVDEHACEEEFIKRMINECSYIPGEKVLPKSSLLYSEYMVLNELNNLRVNGDKLNPKIKKEIVENIYKKERKVTLKKIRNFLIINNYVDSKVEFSGLSDGIKANMSSYIDFAEILDDNFDNNMVEDLIEQITIHVGNVKLLTEKISNKYPNLEKKQINKIVNLKFKDWARFSRKLLVGIEGTEKETGEINTIIGFLRETNENFMELMSNRYTFSEEISEIKKKYIPNKLSKQIVDDLYVSPAVKKMIWQVLNINDELIKVLGKQPKKIFIEMARGKEEKPEVKDSRKNKLIELYKNLGKEGKEWLNRIEDKTEADFRNRALYLYYTQMGRCMYTGEIIDIERLYDKELYDLDHIIPRKMKKDDSIHKNLVLVTRNSNQYEKKDNYPVPEVIKSRENVRHLWYALKKKGLITEEKYNRLTRINPLSDKELSEFIERQLVETRQTTKVVKDLFENYYTDSKIVTVKAGLVSELRRDFEVLKCREINDLNHAHDAFLNIIVGDVWSKKFTSNPYNFVKKNREKYTLNNIFTKNQKDLRGNEIWNCAEGKKRIIKTLNKPSVLFSVENFEQTGQLFDQNIIGKQDYKEKTSYVPIKGDERLQDISKYGGYRGISGAYFFIVEHTEKNKRVKTIESLPIYMKSYVEENGLLDFCTNEMKLVDPKIIVKKLNYKSEIIVDGFKYLISGKTENRLSLETNEYLYWNHTQTTDIKKILNINEKIELEKYNGDIESERENIIKYIQIILEKFKLKPFIKRRNLPNIEINFADYETEKLLQLLVNLIPLTTKYVSPVDLTVISGSKYAGKVLIPKKISNLNEVIFISKSITGIYESRRRII

SEQ ID NO: 458 - protein, 1023 aa, Helicobacter cinaedi
MKIYSFDIGVASIGWAFIENEVLQDCGIRIFTKAENPKNGASLALPRREARGVRKRLARRRGRLNTIKQLLCKEFGLQLEDYLSNDGELPKAYTASKANPLKSPYELRTLALSQKLDSKDLVRVILHIAKHRGYGNKHAKDSKDTESGKVKKAIEFNRKTLAEKGYRSVGEYLYREFFQQSRISQNNGATEFINVRNKAGNYEHCVAQDMLKEELESILNAQRQFGFSLKQDFENKLLTKIFEQRPLKSFADKVGNCCFIAGEKRTPKDSLSAIEFIALSRTINTLINLSKESGEIYNRAIILQIVESTLKKGEISYKELREIIRLDERLRFKDPRLDYSREIKEAEKVKFLEFKQLKGFKKALGESFTTLARSQLDEIAEHIALIKDRVKLNEKLESYALTKEQREALSNLSFSAHINLSLQALKQILPFMRGDNGEQCLDYDESVEKAGLKALSKDTLKGQMLPPLNEFEPYLSNPVVARALAEYRKVLNALLKQYGSPHKIHIEYAREAKLSSTERQKYEKEQKDNYAANQAAHKKCQELGLEPSSTNLLKLKLWQEQGGLCLYSGAKITISYLQDPTALQVDHIYPYSRSFDDSYMNKCLVLTKANQEKGNRTPFEAFGTDSAKWGVITTLAQKLPHKKRRRILNTAFNDKEAGFKLRNLNDTSYIARLVADYTETYLEFLPLVESENTTLGKGQKGSKKHIAIVNGALTSTMRYYLGFASKDRDNHLHHALDAVIIGFMNDSVIKAFSDFKKTQETSKAAYYAHTLSKQEYKKQRAFIQLPSGENFRASVLEKVESVFVSKPPRKRVRGALHEATFYSPNDPKLLKNYGGTKGVERALALGKMRKVGAKIVSNGAMVRVDIFRHKSSGKFYGVPVYTMDFALGILPNKAVVVGKDKNGVIKDWLEMDSSYEFIFSLYKDDLLLVQKKEMAEPELCYFMSFNSSIAQISVAKHDNNFSTLTKNQKLLFSNATQEDVSGKSIGIQNLQVFEKWQVSVLGEVKRTQSYPRENISLASKAKK

SEQ ID NO: 459 - protein, 1023 aa, Helicobacter cinaedi
MKIYSFDIGVASIGWAFIENEVLQDCGIRIFTKAENPKNGASLALPRREARGVRKRLARRRGRLNTIKQLLCKEFGLQLEDYLSNDGELPKAYTASKANPLKSPYELRTLALSQKLDSKDLVRVILHIAKHRGYGNKHAKDSKDTESGKVKKAIEFNRKTLAEKGYRSVGEYLYREFFQQSRISQNNGATEFINVRNKAGNYEHCVAQDMLKEELESILNAQRQFGFSLKQDFESKLLTKIFEQRPLKSFADKVGNCCFIAGEKRAPKDSPSAIEFIALSRTINTLINLSKESGEIYNRAIILQIVESTLKKGEISYKELREIIRLDERLRFKDPRLDYSREIKEAEKVKFLEFKQLKGFKKALGESFTTLAISQLDEIAEHIALIKDRVKLNEKLESYALTKEQREALSNLSFSAHINLSLQALKQILPFMRGDNGEQCLDYDESVEKAGLKALSKDTLKGQMLPPLNEFEPYLSNPVVARALAEYRKVLNVLLKQYGSPHKIHIEYAREAKLSSTERQKYEKEQKDNYAANQAAHKKCQELGLEPSSTNLLKLKLWQEQGGLCLYSGAKITISYLQDPTALQVDHIYPYSRSFDDSYMNKCLVLTKANQEKGNRTPFEAFGTDSAKWGVITTLAQKLPHKKRRRILNTAFNDKEAGFKLRNLNDTSYIARLVADYTETYLEFLPLVESENTTLSKGQKGSKKHIAIVNGVLTSTMRYYLGFASKDRDNHLHHALDAVIIGFMNDSVIKAFSDFKKTQETSKAAYYAHTLSKQEYKKQRAFIQLPSGENFRVSVLEKVESVFVSKPPRKRVRGALHEATFYSPNDPKLLKNYGGTKGVERALALGKMRKVGAKIVSNGAMVRVDIFRHKSSGKFYGVPVYTMDFALGILPNKAVVVGKDQNGVIKDWLEMDSSYEFIFSLYKDDVILVQKKEMQRPELCYFVSFDTSGASIKVAKHDNNFSTLTENQKLLFSNATKEEVVGKSIGIQNLKVFEKWQVSVLGEVKRTQSYPRENISLASKAKK

SEQ ID NO: 460 - protein, 344 aa, Helicobacter pullorum
MKILGFDIGIASIGWAFVENGELKDCGVRIFTKAENPKTGDSLAMPRREARSVRRRLARRKGRLETLKRLLAKEWDLCYEDYIAADGELPKAFMGKNLTNPYVLRYEALQRLLSKEELVRVVLHIAKHRGYGNKNAKITKSEESKREQGKILSALATNASVIARYRTVGEYFYKEFCEVIKNPQGLNTNENCTQPKVRVLKPIRNKGGEYTNCILQEDLQRELRCIFEHQKGFGFSITQEFQDKILKIAFYQRSLKDFSHLVGKCTFYPDEPRAPKFSLSAIEFITKAKAINLLASIAKESGEVWDKEQWRERLDSVFSAVCERGINTIPSSSHFLNIFDILYL

SEQ ID NO: 461 - protein, 1688 aa, Ignavibacterium album
MEFKKVLGLDIGTNSIGCALLSLPKSIQDYGKGGRLEWLTSRVIPLDADYMKAFIDGKNGLPQVITPAGKRRQKRGSRRLKHRYKLRRSRLIRVFKTLNWLPEDFPLDNPKRIKETISTEGKFSFRISDYVPISDESYREFYREFGYPENEIEQVIEEINFRRKTKGKNKNPMIKLLPEDWVVYYLRKKALIKPTTKEELIRIIYLFNQRRGFKSSRKDLTETAILDYDEFAKRLAEKEKYSAENYETKFVSITKVKEVVELKTDGRKGKKRFKVILEDSRIEPYEIERKEKPDWEGKEYTFLVTQKLEKGKFKQNKPDLPKEEDWALCTTALDNRMGSKHPGEFFFDELLKAFKEKRGYKIRQYPVNRWRYKKELEFIWTKQCQLNPELNNLNINKEILRKLATVLYPSQSKFFGPKIKEFENSDVLHIISEDIIYYQRDLKSQKSLISECRYEKRKGIDGEIYGLKCIPKSSPLYQEFRIWQDIHNIKVIRKESEVNGKKKINIDETQLYINENIKEKLFELFNSKDSLSEKDILELISLNIINSGIKISKKEEETTHRINLFANRKELKGNETKSRYRKVFKKLGFDGEYILNHPSKLNRLWHSDYSNDYADKEKTEKSILSSLGWKNRNGKWEKSKNYDVFNLPLEVAKAIANLPPLKKEYGSYSALAIRKMLVVMRDGKYWQHPDQIAKDQENTSLMLFDKNLIQLTNNQRKVLNKYLLTLAEVQKRSTLIKQKLNEIEHNPYKLELVSDQDLEKQVLKSFLEKKNESDYLKGLKTYQAGYLIYGKHSEKDVPIVNSPDELGEYIRKKLPNNSLRNPIVEQVIRETIFIVRDVWKSFGIIDEIHIELGRELKNNSEERKKTSESQEKNFQEKERARKLLKELLNSSNFEHYDENGNKIFSSFTVNPNPDSPLDIEKFRIWKNQSGLTDEELNKKLKDEKIPTEIEVKKYILWLTQKCRSPYTGKIIPLSKLFDSNVYEIEHIIPRSKMKNDSTNNLVICELGVNKAKGDRLAANFISESNGKCKFGEVEYTLLKYGDYLQYCKDTFKYQKAKYKNLLATEPPEDFIERQINDTRYIGRKLAELLTPVVKDSKNIIFTIGSITSELKITWGLNGVWKDILRPRFKRLESIINKKLIFQDEDDPNKYHFDLSINPQLDKEGLKRLDHRHHALDATIIAATTREHVRYLNSLNAADNDEEKREYFLSLCNHKIRDFKLPWENFTSEVKSKLLSCVVSYKESKPILSDPFNKYLKWEYKNGKWQKVFAIQIKNDRWKAVRRSMFKEPIGTVWIKKIKEVSLKEAIKIQAIWEEVKNDPVRKKKEKYIYDDYAQKVIAKIVQELGLSSSMRKQDDEKLNKFINEAKVSAGVNKNLNTTNKTIYNLEGRFYEKIKVAEYVLYKAKRMPLNKKEYIEKLSLQKMFNDLPNFILEKSILDNYPEILKELESDNKYIIEPHKKNNPVNRLLLEHILEYHNNPKEAFSTEGLEKLNKKAINKIGKPIKYITRLDGDINEEEIFRGAVFETDKGSNVYFVMYENNQTKDREFLKPNPSISVLKAIEHKNKIDFFAPNRLGFSRIILSPGDLVYVPTNDQYVLIKDNSSNETIINWDDNEFISNRIYQVKKFTGNSCYFLKNDIASLILSYSASNGVGEFGSQNISEYSVDDPPIRIKDVCIKIRVDRLGNVRPL

SEQ ID NO: 462 - protein, 1354 aa, Indibacter alkaliphilus
MKKILGLDLGTTSIGWAFIKEPEKDVVGSEIVDMGVRIVPLSSDEENDFAKGNTISINADRTLKRGARRNLQRFKQRRNALLETFKEKNLIPSNFQYAEDGPSSTFSTLKLRDKAAKEKIELDDFVKVLLQINKKRGYKSSRKAMSEEDEGTAIDSMGIAKELYENDLTPGQWVYEALKNGRKNVPDFYRSDLQEEFKKIVNYQSEFYPDILNTSFVEDWMGKASTPTKQYFNKRGVQLAENKGKREERRLQEYKWRAEAVNFKIDLSEIALILSQINSQISNSSGYLGAISDRSKELYFKNLTVGQYLYQQVKKNPHTRLKGQVFYRQDYLDEFEKIWSVQSSFYPQLNDELKQEVRDVTIFFQRRLKSQKHLISNCEFEEHHKVVPKSHPIFQEFRIWQNLNNLTLIKKDNLNEKCELALEDKTALANELAFKKELSVKDALKVLGLKPSDWEFNFTKIEGNRTNHAFFEAFAKIIELEDGEPIDLGNLKADDILDQFSEAFLRIGIDTELLQVNSDIEGAEYEKQSYIQFWHLLYSSEDDQKLKQNLIRKFGFKPEHAKILASISLQDDHASLSSRAIKKILPHLQSGLIYDKACTYAGYNHSSSFTKDENEKRELRAELELLKKNSLRNPVVEKILNQMINVVNAILKDPNLGRPDEIRVEMARELKANAEQRKNMTSNIASATRDHEKYREILKKEFGLKRVTKNDLLRYKLWLETDGISLYTGKPIEASKLFSKEYDIEHIIPKARLFDDSFSNKTICERQLNIDKANVTAFSFLQNKLSADEFEQYQSRVKSLYGKLSKAKIQKLLMANDKIPEDFIARQLQETRYISKKAKEILFEITMRVSVTTGTITDKLREDWGLVEIMKELNWEKYDKLGLTYTIEGKHGERLNKIKDWNKRNDHRHHAMDALTVALTKPAYIQYLNNLNAKAIGNKKGTEIFAIEQKYLKRENGKLCFIPPIENIRAEAKKHLSKILVSYKAKNKVVTINKNKTKKKAGFNEQTALTPRGQLHKETVYGKSFHYSTKFEKIGASFDAQKINTVAKKEEREALLKRLAENGNDPKKAFTGKNSLNKMPIYLDLGKNIKLSEKVKTVVLEQNYTIRKNIDPDLKVDKVIDVGIKRILESRLEEFGGNAKLAFSNLEENPIWLNKEKGIPIKRVKISGVSNVESLHVKKDHFGEKILDEEGNEIPVDFVSTGNNHHVAIYEDEDGNLQDEVVNFYEAVIRRNQGESIIKYRHEEGWNFLYSIKQNEFFVFPSQDFNPNDFDLLDPKNYDLISPNLYRAQKFSKVMYGNSAVRDYVFRHHLETVLNDVKELKDVAYKQLKSLQYLNGIKKVRLNHLGQIIQVGEY

SEQ ID NO: 463 - protein, 1397 aa, Joostella marina
MKKVLGLDLGTNSIGWALVNEATKEEKKEGKSSEIIKLGVRVNPLTVDEKTNFEKGRPLSTNADRTLKRSARRNLQRYKLRRRNLIEILIKNGFITKDTPLTETGKDTTHQTLKLRAKSAKEKVDLKDFAKILLTINKKRGYKSSRKVNSDEDGLAIDGMAVAKHLYEQNLTPGQYVLNLLQKNKKYVPDFYRSDLQEEFKNIWNNQKTYYFDILTDTLFEELKDKNKSQTWAICKKPFDIAGIKQIGKASDKRLERYKWRTEGLTQKLNLEYLAIALQEINNDINKSSGYLGAISDRSKELFFNKETVGENLYRQLVKTPHTSLRNQVFYRQDYLDEFETIWETQAKFYPQLTHTLKEEIRDVIIFYQRKLKSQKSLISFCQFESWEQTYIEKETGKSKTRTVGRKVIPKSSPLFQEFKIWQNLNSLEFRNSDEGEIIEFIKLDEDIRQTVFEELNLRGNLKPNDVLKILGNYISLGKVSQWKCNFEEIEGNRTNAALYNVYQIIAENEGYGFDWAKKTASEINKELKNIFPQLGIDASILDFDFTQANFDKQTSYQLWHLLYSAEEDFKISEEDKVLYGNSSVSLKKKLHQKYGFKPEYTKLLTNISLQPDYGNLSAKAICNILPYLKENNVYSEACDLTGYNHSNFLTAEEQAKRPLKPILELLKKNSLRNPVVEKILNQMVNVVNQVIETYGKPDEIRIELTRELKKSAKERANMTKSIADATRRNDDYRKTIIKEFGIPNPTKSDVVRYRLWQELASRGYKDIFTDTEIKPQELFSNKIDIEHIIPKALLFDDSFSNKTLAFKKDNLKKANRTAYDFIANDYAPNLENYIERVESLHKDRKITRAKRNKLLMLQSKLPDGFIERDLRNSQYITKEAKKMLYEVCRTVVSTSGSITDKLREDWDLINVMKELNFPKYKALGLTEKIERYDIGAEKMKEVEIIEDWNKRNDHRHHAIDALTVAFSTHSHIQYLNHLNARRDEGHKKHAAIIAIESTITEKEGNKKRRFIAPLPNFRLQAKEHIESILVSFKNKNKVVTNNINKTKRIKKDKFNTKVQLTPRGQLHKETIYGKIKQPLEKHIKLNKSFTLEQAKLIIDKRQREKVLNHLEKYAHNSDIAFNSKTLKKNPLLISDEPLKEVLCFEEVFTIRKDISYDNFKNEKQLDKVIDEKVKQALKERINQYNGDFREAFSDIERNPIWLNKAKGICVKRATIKGVSNAEPLHTAKNHLGEEVLTENKEQIPVDYVSTGNNHHVAIYEDEDGNLQEKVVSFYEAVIRVNEGLPIIDKEYNKSLGWTFKFTMKQNEMFVFPSEDFNPTEIDLLDQKNASLISPNLFRVQKFTIKDYFFRHHLETTVENNNTLKNTTWRREGLSGIYGIIKIRLNHLGEIVQVGEY

SEQ ID NO: 464 - protein, 1060 aa, Kingella kingae
MAAKSLNYILGLDLGIASCGWAVVEMDEQENPLRLIDVGVRTFEEAENPKDGSSLAETRRLARAQRRLISRRANRMNKLCRLLKQENVLQANDYDEKGLIIGLPNQAWELRAQGLDRKLEPKEWAAVLIHLVKHRGYLSQRKNESQTADKELGALLSGMNHNHQLLQSQSNQYRTPAELAIKQFATQDGHIRNQRGAYTHTFNRLDLQNELNQLFDAQTRLGNPHVSGSLKTAINDLLMNQKAALSGDAILEMLGRCTFEPSEYKAAKNTYSAERFVWLGKLTNLRIQDNGLESALSREQRELLLNEPYNKTKLTYQQVRKLLRLPETAFFKGLRYGKDNAESATFMEMKSYHAIRKSLENKSLKSEWEKLKTQPKLLDLIGTAFSIYKTDDEIAGCLKNQLPENVIIALQGQLNFSNFMELSLKALEKLLPLMEQGLRYDEACTQIYGNRHEKIADKTEKFLPNIPADKLRNPVVLRTLTQARKVINAIIRRYGSPARVHIETGREVGKSFSDRDKLKKQQEENQEQRRRAIDEWKQFFPNAAHEPKAVDILKLRLYQLQQGKCLYSGLPIDVRRLPEKGYVEIDHALPFSRTWDDSFNNKILVLASENQNKGNQTPYEYLRGADNSESWRLFVENVQNCQFSPNKKQKIMAKQLDEKGFLERNLNDTRYVSRFLCQFISEHLHLTGKGKKRVFASNGQITALLRGRWGLSKNREENDRHHAVDAVVVACSTVAMQQKITQFVRYQKGNVFTGERIDKETGEVISIHFPTPWEHFREEVMIRVFDDNPLRTLPEKLPNRPEALHEYVMPLFVSRMPTRKMTGQGHKETIKSAKRLDEKISVLRVPLTQLKLNDLENMVNREREPALYEALKARLEQFKNDPAKAFAEPFFKQGGQQVKAVRVEIVQKSGMLLRKINGVADNGSMVRVDVFEKSGKFYLVPIYAWQVAEGILPNYAVVAHKDESDWILMDESYHFKFALYKNDLLEVQTKKGGIMGYFASLDRATGAITIREHDRDKKKCKDGEHRSIGVKMASSFKKLQVDELGKNIHETRSRKRPNIG

SEQ ID NO: 465 - protein, 1314 aa, Lactobacillus animalis
MLKKDYSIGLDIGTNSVGHAVVTDDYKVPTKKMKVFGDTSKKTIKKNMLGVLLFNEGQTAADTRLKRGTRRRYTRRKNRLRYLQEIFAPELAKVDPNFLYRLEESSLVAEDKKYDVYPIFGKREEELLYHDTYKTIYHLRSALANNDQPADLRLVYLALAHIIKYRGNFLLEGEIDLRTTDINKVFAEFSETLNENSDENLGKLDVADIFKNNTFSKTKKSEELLKLSGAKKNQLAHQLFKMMVGNMGSFKKVLGTDEEHKLSFGKDTYEDDLNDLLAEAGDQYLDIFVAAKKVYDAAILASILDVKDTQTKTVFSQAMIERYEEHQKDLIELKRVFKKYLPEKCHDFFSEPKISGYAGYIDGKVSEEDFYKYTKKTLKGIPETEEILQKIDANNYLRKQRTFDNGAIPHQVHLKELVAIVENQGKYYPFLRENKDKFEKILNFRIPYYVGPLARGNSKFAWLTRAGEGKITPYNFDEMIDKETSAEDFIKHMTINDLYLPTEPVLPKHSLLYERYTIFNELAGVRYVTENGEAKYFDAQTKRSIFELFKLDRKVSEKMVIKHLKVVMPAIRIQALKGLDNGKFNASYGTYKDLVDMGVAPELLNDEVNSEKWEDIIKTLTIFEGRKLIKRRLENYRDFLGEDILRKLSRKKYTGWGRLSAKLLDGIYDKKTHKTILDCLMTEDYSQNFMQLINDDNYSFKETIKNAQVIEKEETLAKTVQELPGSPAIKKGILQSLEIVDEIIKVMGYKPKSIVVEMARETQKTHGTRKREDRVQQIVENLKDANELPEKLPSNAELSDERKYLYCLQNGRDMYTGAPLDYDHLQFYDVDHIIPQSFLKDDSIENKVLTIKKENVRKTNGLPSEAVIQKMGSFWKKLLDAGAMTNKKYDNLRRNLHGGLNEKLKERFIERQLVETRQITKYVAQLLDQRLNYDGNGVELDEKIAIVTLKAQLASQFRSEFKLRKVRALNNLHHAHDAYLNAIVANLIMAKYPELEPEFVYGKYRKAKFKGLGKATAKNTLYANVLYFLKENEVYPFWDKARDLPTIKRYLYRAQVNKVRKAERQIGGFSDEMLVPKSDSGKLLPRKEGLDPVKYGGYAKAVESYAVLITADEVKKGKTKKVKTLVNIPIIDSKKYEADPTAYLASRGYTNVTNSFILPKYSLLEDPEGRRRYLASFKEFQKANELILPQHLVELLYWVNAKDGEQKLEDHKAEFKELFDKIMEFADKYVVAPKNSEKIRRLYEENQDATPMELGKNFVELLRYTADGAASDFKFFGENIPRKRYNSAGSLLNGTLIYQSKTGLYETRIDLGKL

SEQ ID NO: 466 - protein, 1371 aa, Lactobacillus buchneri
MKVNNYHIGLDIGTSSIGWVAIGKDGKPLRVKGKTAIGARLFQEGNPAADRRMFRTTRRRLSRRKWRLKLLEEIFDPYITPVDSTFFARLKQSNLSPKDSRKEFKGSMLFPDLTDMQYHKNYPTIYHLRHALMTQDKKFDIRMVYLAIHHIVKYRGNFLNSTPVDSFKASKVDFVDQFKKLNELYAAINPEESFKINLANSEDIGHQFLDPSIRKFDKKKQIPKIVPVMMNDKVTDRLNGKIASEIIHAILGYKAKLDVVLQCTPVDSKPWALKFDDEDIDAKLEKILPEMDENQQSIVAILQNLYSQVTLNQIVPNGMSLSESMIEKYNDHHDHLKLYKKLIDQLADPKKKAVLKKAYSQYVGDDGKVIEQAEFWSSVKKNLDDSELSKQIMDLIDAEKFMPKQRTSQNGVIPHQLHQRELDEIIEHQSKYYPWLVEINPNKHDLHLAKYKIEQLVAFRVPYYVGPMITPKDQAESAETVFSWMERKGTETGQITPWNFDEKVDRKASANRFIKRMTTKDTYLIGEDVLPDESLLYEKFKVLNELNMVRVNGKLLKVADKQAIFQDLFENYKHVSVKKLQNYIKAKTGLPSDPEISGLSDPEHFNNSLGTYNDFKKLFGSKVDEPDLQDDFEKIVEWSTVFEDKKILREKLNEITWLSDQQKDVLESSRYQGWGRLSKKLLTGIVNDQGERIIDKLWNTNKNFMQIQSDDDFAKRIHEANADQMQAVDVEDVLADAYTSPQNKKAIRQVVKVVDDIQKAMGGVAPKYISIEFTRSEDRNPRRTISRQRQLENTLKDTAKSLAKSINPELLSELDNAAKSKKGLTDRLYLYFTQLGKDIYTGEPINIDELNKYDIDHILPQAFIKDNSLDNRVLVLTAVNNGKSDNVPLRMFGAKMGHFWKQLAEAGLISKRKLKNLQTDPDTISKYAMHGFIRRQLVETSQVIKLVANILGDKYRNDDTKIIEITARMNHQMRDEFGFIKNREINDYHHAFDAYLTAFLGRYLYHRYIKLRPYFVYGDFKKFREDKVTMRNFNFLHDLTDDTQEKIADAETGEVIWDRENSIQQLKDVYHYKFMLISHEVYTLRGAMFNQTVYPASDAGKRKLIPVKADRPVNVYGGYSGSADAYMAIVRIHNKKGDKYRVVGVPMRALDRLDAAKNVSDADFDRALKDVLAPQLTKTKKSRKTGEITQVIEDFEIVLGKVMYRQLMIDGDKKFMLGSSTYQYNAKQLVLSDQSVKTLASKGRLDPLQESMDYNNVYTEILDKVNQYFSLYDMNKFRHKLNLGFSKFISFPNHNVLDGNTKVSSGKREILQEILNGLHANPTFGNLKDVGITTPFGQLQQPNGILLSDETKIRYQSPTGLFERTVSLKDL

SEQ ID NO: 467 - protein, 315 aa, Lactobacillus casei
MFKDYLKQLEDDGTAKAIRQLYDRYIDGDDAKPFVREDFVKALTKEVTAHPNAKSPELLERLAQPDFMLKQRNKANGAIPVQMQQRELDQIIKNQSVYYDWLAAPNPVEKHRKSMPYQLDELLNFRIPYYVGPLVTAKEQKAARGGVFAWMVRKDPDGNITPYNFDEKVDREASANTFIQRMKTTDTYLIGEDVLPKQSLLYQSYEVLNELNNVRVNDNKLSFDQKQQVLGELFERHNTVTIKQFVDNLLAHGDYDRIPEVRGLADEKRFLSSLSTYNQLKGILHEAIDDSDKQTDMVDCKINPNAVRTKKISFL

SEQ ID NO: 468 - protein, 236 aa, Lactobacillus casei
MFKDYLKQLEDDGTAKAIRQLYDRYIDGDDAKPFVREDFVKALTKEVTAHPNAKSPELLERLAQPDFMLKQRNKANGAIPVQMQQRELDQIIKNQSVYYDWLAAPNPVEKHRKSMPYQLDELLNFRIPYYVGPLVTAKEQKAARGGVFAWMVRKDPDGNITPYNFDEKVDREASANTFIQRMKTTDTYLIGEDVLPKQSLLYQSYEVLNELNNVRVNDNKLSSSIFKSSATMITNS

SEQ ID NO: 469 - protein, 1389 aa, Lactobacillus casei
MIIRTYELKTITTIAILKMFQLLTGGLSMTKLGKPYGIGVDIGSNSIGFAAVDENSHLIRLKGKTVIGARLFEEGKAAADRRASRTTRRRLSRNRWRLSFLRDFFESHITPTGPNFFMRQKYSEISPKDKARYKYEKRLFNDRTDAEFYQQYPTMYHLRNRLLTDPSKADVREIYFAIHHILKSRGHFLTSGYAKDFNTNKVALNEIFPALQDAYAQVYPDLDITFDENKVNEFKTVLLNEKATPSDTQRALVNLLLAEDGDKDILKQQKQVLTEFAKAVVGLKTKLNVALGTEVDSSEATVWNFSLGQLDDKWAGIESAMTDEGTEILDQIRDLYRARLLNGIVPAGKTLSQAKVDDYAQHHEDLELFKDYLKQLEDDGTAKAIRQLYDRYIDGDDAKPFVREDFVKALTKEVTAHPNAKSPELLERLAQPDFMLKQRNKANGAIPVQMQQRELDQIIKNQSVYYDWLAAPNPVEKHRKSMPYQLDELLNFRIPYYVGPLVTAKEQKAAQGGVFAWMVRKDPDGNITPYNFDEKVDREASANTFIQRMKTTDTYLIGEDVLPKQSLLYQRYEVLNELNNVRVNNEKLSIEQKQQVIRELFERHNSVTIKQFAENLRAHGDYAHIPEIRGLADEKRFLSSLSTYRQLKSLLPDAIDDPAKQADIENIIAWSTVFEDAAIFKTKLKEINWLDSQTITKLSNIRYRGWGQFSHKFLNGLTLGNGHTIIQELFLSNNNLMQILTDETLQKKMTELNADKLKAANINDAIDDAYTSPSNKKALRQVLRVIEDIKRAADGQDPSWLYVETADGGGTPGKRTRARQHQLQEIYANAAHELIDSAVRGELEDKIADKADFNDRLVLYFMQGGRDIYTGTPLNIDQLSSYDIDHILPQSLIKDNSLDNRVLVHAIINREKNATFASTIYAQKMNATWRQWHEAGLISGRKLRNLQMRPDQIDKYASGFVARQLVETRQIIKLTEQIVAAQYPETKIIAVKAGLSHQLREELEFPKNRDVNHYHHAFDAFLAARIGTYLLKRFPNLQAFFTYGKFKKADVKKLRGFNFIRDITHAEDKIVVKDTGEVIWDKKRDVDELDRIYNFKRMLITHEVHFEKADLFKQTVYGAKDSKEAGGKKQLISKKKGYPVDIYGGYTQETGSYLSVVRLTKKAMYAVVKVSTRDAAKLAVAKSISEQKENETLNDIIDEKLSKISKNGKITHELFEVVLPRVGQKTLFKNSKYNLFLVNSDTYMHNYQELWMPREYQKMWKDISLSKYGDAQTEDQLDQIFGFIVSQVNSYFNLYDINQFRKKLNDAADKFATLPMRDTDDMQGKIATIGQLLIGLQANAARSDLRNLDIKTPLGLLQIPNGISLDSDTSVVYQSPTGLLEREVHLSDL

SEQ ID NO: 470 - protein, 412 aa, Lactobacillus casei
MIKDNSLDNRVLVHPLVNREKDTIFASTRFAKQTNGMWRQWHAAGLISSRKLRNLQMRPDEIDKYASGFVARQLVETRQIIKLTEQIVADQYPDTKIIAVKAGLSSQLRKELDFPKNREVNHYHHAFDAFLAARIGTYLLKRYPNLEPFFTYGKFKKTEVKKLKSFNFIRDMTHAKDKIVAKETGEIVWDNASDINELDRIYNFKRMLITHEVRFETASLFKQTLYAAKNPKNRGGSRQLIPKKKGYLVDIYGGYTQETGSYLSVVRLTKKAMYAVVKVSTRDAAKLAVAKSISEQKENETLKKIIDGKLSKTSKKGKTTHQLFEIVLPRVGQKTLFKNSKYNQFLVNSDTYMHNYQELWMPREYQRMWKDILLSNHGDAQIEGQLDQIFKFIVSQVNSYFNLYDINQFRKK

SEQ ID NO: 471 - protein, 234 aa, Lactobacillus casei
MKVTKKTETIFKVVKIATSQVAALNKARSRSTAEELSVLTELLKPKFSKVGKNGKITDTPFEVVLPRVPREQLFYNAKYGFFMVNSDTMFHNFQEIWVSRSDQKILQQIRKAKIDYPNVDQDLDNLFHNLADQIVKYFDLYSIAGFKEKISQSQNTFNDLAVDDTDQSVGKITVINELLKGAQANGMTGSLKVLKISTPFGFTQDKSGVLTKDSSIIYQSPTGLFERSVRLTDL

SEQ ID NO: 472 - protein, 566 aa, Lactobacillus casei
MQILTDEVLKQKIAELNAHELKASGIYAAIDDAYTSPSNKKALRQVLSVIDDITNAAGQAPNWLYIETADGDGVPGKRTNSRQRKIQEIYVNAAQELITSSVRGELEDKIASRADFTDRLVLYFMQGGRDIYTGEPLNIDNLSSYDIDHILPQSLIKDNSLDNRVLVHPLVNREKDTIFASTRFAKQMNGMWRQWHAAGLISSRKLRNLQMRPDEIDKYASGFVARQLVETRQIIKLTEQIVADQYPDAKIIAVKAGLSSQLRKELDFPKNREVNHYHHAFDAFLAARIGTYLLKRYPNLEPFFTYGKFKKTEVKKLKSFNFIRDMTHAKDKIVAKETGEIVWDNASDINELDRIYNFKRMLITHEVRFETASLFKQTLYAAKNSKNRGGSRQLIPKKKGYLVDIYGGYTQETGSYLSVVRLTKKAMYAVVKVSTRDAAKLAVAKSISEQKENETLKKIIDGKLSKTSKKGKTTHQLFEIVLPRVGQKTLFKNSKYNQFLVNSDTYMHNYQELWMPREYQRMWKDILLSNHGDAQLEGQLDQIFKFIVSQVNSYFNLYDINQFRKK

SEQ ID NO: 473 - protein, 1363 aa, Lactobacillus casei
MTKLGKPYGIGVDIGSNSIGFAAVDENSHLIRLKGKTVIGARLFEEGKAAADRRASRTTRRRLSRNRWRLSFLRDFFESHITPTDPNFFMRQKYSEISPKDKARYKYEKRLFNDRTDAEFYQQYPTMYHLRNRLLTDPSKADVREIYFAIHHILKSRGHFLTSGYAKDFNTNKVALNEIFPALQDAYAQVYPDLDITFDENKVNEFKTVLLDEKATPSDTQRALVNLLLAEDGDKDILKQQKQVLTEFAKAVVGLKMKLNVALGTEVDSSEATAWNFSLGQLDDKWAGIESAMTDEGTEILDQIRDLYRARLLNGIVPAGKTLSQAKVDDYEQHHEDLELFKDYLKQLEDDGMAKVIRQLYDRYIDGDDAKPFVREDFVKALTKEVTAHPNAKSPELLERLVQPDFMLKQRNKANGAIPVQMQQRELDQIIKNQSVYYDWLAAPNPVEKHRQSMPYQLDELLNFRIPYYVGPLVTAKEQKAAQGGVFAWMVRKDPDGNITPYNFDEKVDREASANTFIQRMKTTDTYLIGEDVLPKQSLLYQSYEVLNELNNVRVNDNKLSFDQKQQVLGELFERHNTVTIKQFVDNLLAHGDYDRIPEVRGLADEKRFLSSLSTYNQLKGILHEAIDDSDKQTDIEKIIAWSTIFEDKAIFKTKLNEISWLTAGMINSLANIRYRGWGQFSHKLLNELTLSTGRTVFEELLISSHNLMQILTDEVLKQKIAELNAHELKASGIYAAIDDAYTSPSNKKALRQVLSVIDDITNAAGQAPNWLYIETADGDGVPGKRTNSRQRKIQEIYANAAQELITGSVRGELEDKIASRADFTDRLVLYFMQGGRDIYTGEPLNIDNLSSYDIDHILPQSLIKDNSLDNRVLVHPLVNREKDTIFASTRFAKQMNGMWRQWHAAGLISSRKLRNLQMRPDEIDKYASGFVARQLVETRQIIKLTEQIVADQYPDAKIIAVKAGLSSQLRKELDFPKNREVNHYHHAFDAFLAARIGTYLLKRYPNLEPFFTYGKFKKTEVKKLKSLKSFNFIRDMTHAKDKIVAKETGEIVWDNASDINELDRIYNFKRMLITHEVRFETASLFKQTLYAAKNSKNRGGSRQLIPKKKGYLVDIYGGYTQETGSYLSVVRLTKKAMYAVVKVSTRDAAKLAVAKSISEQKENETLKKIIDGKLSKTSKKGKTTHQLFEIVLPRVGQKTLFKNSKYNQFLVNSDTYMHNYQELWMPREYQRMWKDILLSNHGDAQLEGQLDQIFKFIVSQVNSYFNLYDINQFRKKIADATDKFAKLPTHDTDNARGKIATIGQLLIGLQANAMRSDLRNLDIKTPFGLLQIGTGITLDLDTSIIYQSPTGLFEREVPLTDL

SEQ ID NO: 474 - protein, 1360 aa, Lactobacillus casei
MTKLGKPYGIGVDIGSNSIGFAAVDENSHLIRLKGKTVIGARLFEEGKAAADRRASRTTRRRLSRNRWRLSFLRDFFESHITPTDPNFFMRQKYSEISPKDKARYKYEKRLFNDRTDAEFYQQYPTMYHLRTRLLTDPSKADVREIYFAIHHILKSRGHFLTPGYAKDFNTNKVALNEIFPALQDAYAQVYPDLDITFDENKVNEFKTVLLNEKATPSDTQRALVNLLLAEDGDKDILKQQKQVLTEFAKAVVGLKTKLNVALGTEVDSSEATVWNFSLGQLDDKWAGIESAMTDEGTEILDQIRDLYRARLLNGIVPAGKTLSQAKVDDYAQHHEDLELFKDYLKQLEDDGTAKAIRQLYDRYIDGDDAKPFVREDFVKALTKEVTAHPNAKSPELLERLAQPDFMLKQRNKANGAIPVQMQQRELDQIIKNQSVYYDWLAAPNPVEKHRKSMPYQLDELLNFRIPYYVGPLVTAKEQKAAQGGVFAWMVRKDPDGNITPYNFDEKVDREASANTFIQRMKTTDTYLIGEDVLPKQSLLYQSYEVLNELNNVRVNDNKLSFDQKQQVLGELFERHNTVTIKQFVDNLLAHGDYDRIPEVRGLADEKRFLSSLSTYNQLKGILHEAIDDADKQTDIENIIAWSTIFEDKAIFKTKLNEISWLNAGMINSLANIRYRGWGQFSHKLLNELTLSTGRTVFEELLISSRNLMQILTDEVLKQKIAELNAHELKASGIYAAIDDAYTSPSNKKALRQVLSVIDDITNAAGQAPNWLYIETADGDGVPGKRTNSRQRKIQEIYANAAQELITGSVRGELEDKIASRADFTDRLVLYFMQGGRDIYTGEPLNIDNLSSYDIDHILPQSLIKDNSLDNRVLVHPLVNREKDTIFASTRFAKQMNGMWRQWHAAGLISSRKLRNLQMRPDEIDKYASGFVARQLVETRQIIKLTEQIVADQYPDTKIIAVKAGLSSQLRKELDFPKNREVNHYHHAFDAFLAARIGTYLLKRYPNLEPFFTYGKFKKTEVKKLKSFNFIRDMTHAKDKIVAKETGEIVWDNASDINELDRIYNFKRMLITHEVRFETASLFKQTLYAAKNSKNRGGSRQLIPKKKGYLVDIYGGYTQETGSYLSVVRLTKKAMYAVVKVSTRDAAKLAVAKSISEQKENETLKKIIDGKLSKTSKKGKTTHQLFEIVLPRVGQKTLFKNSKYNQFLVNSDTYMHNYQELWMPREYQRMWKDILLSNHGDAQLEGQLDQIFKFIVSQVNSYFNLYDINQFRKKIADATDKFAKLPTHDTDNARGKIATIGQLLIGLQANAMRSDLRNLDIKTPFGLLQIGTGITLDLDTSIIYQSPTGLFEREVPLTDL

SEQ ID NO: 475 - protein, 700 aa, Lactobacillus casei
MTKLGKPYGIGVDIGSNSIGFAAVDENSHLIRLKGKTVIGARLFEEGKAAADRRASRTTRRRLSRNRWRLSFLRDFFESHITPTDPNFFMRQKYSEISPKDKARYKYEKRLFNDRTDAEFYQQYPTMYHLRTRLLTDPSKADVREIYFAIHHILKSRGHFLTSGYAKDFNTNKVALNEIFPALQDAYAQVYPDLDITFDENKVNEFKTVLLDEKATPSDTQRALVNLLLAEDGDKDILKQQKQVLTEFAKAVVGLKTKLNVALGTEVDSSEATAWNFSLGQLDDKWAGIESAMTDEGTEILDQIRDLYRARLLNGIVPAGKTLSQAKVDDYEQHHEDLELFKDYLKQLEDDGMAKAIRQLYDRYIDGDDAKPFVREDFVKALTKEVTAHPNAKSPELLERLVQPDFMLKQRNKANGAIPVQMQQRELDQIIKNQSVYYDWLAAPNPVEKHRQSMPYQLDELLNFRIPYYVGPLVTAKEQKAAQGGVFAWMVRKDPDGNITPYNFDEKVDREASANTFIQRMKTTDTYLIGEDVLPKQSLLYQSYEVLNELNNVRVNDNKLSFDQKQQVLGELFERHNTVTIKQFVDNLLAHGDYDRIPEVRGLADEKRFLSSLSTYNQLKGILHEAIDDSDKQTDIEKIIAWSTIFEDKAIFKTKLNEISWLNAGMINSLANIRYRGWGQFSHKLLNELTLSTGRTVFEA

SEQ ID NO: 476 - protein, 330 aa, Lactobacillus casei
MTKLGKPYGIGVDIGSNSIGFAAVDENSHLIRLKGKTVIGARLFEEGKAAADRRASRTTRRRLSRNRWRLSFLRDFFESHITPTDPNFFMRQKYSEISPKDKNRYKYEKRLFNDRTDAEFYQQYPTMYHLRNRLLTDPSKADVREIYFAIHHILKSRGHFLTPGDAKDFNTNKVALNEIFPALQDAYAQVYPDLDITFDENKMNEFKTVLLNEKATPSDTQRALVNLLLAEDGDKDILKQQKQVLTEFAKAVVGLKTKLNVALGTEVDSSEATAWNFSLGQLDDKWAGIESAMTDEGTEILDQIRDLYRARLLNGIVPAGKTLSQAKVDD

SEQ ID NO: 477 - protein, 330 aa, Lactobacillus casei
MTKLGKPYGIGVDIGSNSIGFAAVDENSHLIRLKGKTVIGARLFEEGKAAADRRASRTTRRRLSRNRWRLSFLRDFFESHITPTDPNFFMRQKYSEISPKDKNRYKYEKRLFNDRTDAEFYQQYPTMYHLRNRLLTDPSKADVREIYFAIHHILKSRGHFLTPGDAKDFNTNKVALNEIFPALQDAYAQVYPDLDITFDENKMNEFKTVLLNEKATPSDTQRALVNLLLAEDGDKDILKQQKQVLTEFAKAVVGLKTKLNVALGTEVDSSEATAWNFSLGQLDDKWAGIESAMTDEGTEILDQIRDLYRARLLNGIVPAGKTLSHAKVDD

SEQ ID NO: 478 - protein, 1361 aa, Lactobacillus casei
MTKLGKPYGIGVDIGSNSIGFAAVDENSHLIRLKGKTVIGARLFEEGKAAADRRASRTTRRRLSRNRWRLSFLRDFFESHITPTGPNFFMRQKYSEISPKDKARYKYEKRLFNDRTDAEFYQQYPTMYHLRNRLLTDPSKADVREIYFAIHHILKSRGHFLTSGYAKDFNTNKVALNEIFPALQDAYAQVYPDLDITFDENKVNEFKTVLLNEKATPSDTQRALVNLLLAEDGDKDILKQQKQVLTEFAKAVVGLKTKLNVALGTEVDSSEATVWNFSLGQLDDKWAGIESAMTDEGTEILDQIRDLYRARLLNGIVPAGNTLSQAKVDDYAQHHEDLELFKDYLKQLEDDGTAKAIRQLYDRYIDGDDAKPFVREDFVKALTKEVTAHPNAKSPELLERLAQPDFMLKQRNKANGAIPVQMQQRELDQIIKNQSVYYDWLAAPNPVEKHRKSMPYQLDELLNFRIPYYVGPLVTAKEQKAAQGGVFAWMVRKDPDGNITPYNFDEKVDREASANTFIQRMKTTDTYLIGEDVLPKQSLLYQRYEVLNELNNVRVNNEKLSIEQKQQVIRELFERHNSVTIKQFAENLRAHGDYAHIPEIRGLADEKRFLSSLSTYRQLKSLLPDAIDDPAKQADIENIIAWSTVFEDAAIFKTKLKEINWLDSQTITKLSNIRYRGWGQFSHKFLNGLTLGNGHTIIQELFLSNNNLMQILTDETLQKKMTELNADKLKAANINDAIDDAYTSPSNKKALRQVLRVIEDIKRAADGQDPSWLYVETADGGGTPGKRTRARQHQLQEIYANAAHELIDSAVRGELEDKIADKADFNDRLVLYFMQGGRDIYTGTPLNIDQLSSYDIDHILPQSLIKDNSLDNRVLVHAIINREKNATFASTIYAQKMNATWRQWHEAGLISGRKLRNLQMRPDQIDKYASGFVARQLVETRQIIKLTEQIVAAQYPETKIIAVKAGLSHQLREELEFPKNRDVNHYHHAFDAFLAARIGTYLLKRFPNLQAFFTYGKFKKADVKKLRGFNFIRDITHAEDKIVVKDTGEVIWDKKRDVDELDRIYNFKRMLITHEVHFEKADLFKQTVYGAKDSKEAGGKKQLISKKKGYPVDIYGGYTQETGSYLSVVRLTKKAMYAVVKVSTRDAAKLAVAKSISEQKENETLNDIIDEKLSKISKNGKITHELFEVVLPRVGQKTLFKNSKYNLFLVNSDTYMHNYQELWMPREYQKMWKDISLSKYGDAQTEDQLDQIFGFIVSQVNSYFNLYDINQFRKKLNDAADKFATLPMRDTDDMQGKIATIGQLLIGLQANAARSDLRNLDIKTPLGLLQIPNGISLDSDTSVVYQSPTGLLEREVHLSDL

SEQ ID NO: 479 - protein, 1128 aa, Lactobacillus casei
MTKLGKPYGIGVDIGSNSIGFAAVDENSHLIRLKGKTVIGARLFEEGKAAAKRRAGRTTRRRLSRNRWRLSFLRDFFESHITPTDPNFFMRQKYSEISPKDKARYKYEKRLFNDRTDAEFYQQYSTMYHLRNRLMTDPSRADVREIYFAIHHILKSRGHFLTPGDAKDFNTNDVALDEIFPALQDAYAQVYPDLGITFDEDKANEFKTILLNEIATSIDTQRALVKLLLAEEDDKDILKQQKQVLTEFAKAVVGLKTKLNLALGTEVDSSEATAWNFSLGQLDDKWAGIESAMTDEGTEILDQIRDLYRARLLNGIVPTGKTLSQAKVDDYTQHHEDLQLFKAYLKQLEDDGTAKAIRQLYDRYIDGDDAAPFLRENFVKALTKDVTAHPNTKSPELLERLAQPDFMLKQRNKANGAIPVQMQQRELDQIIKNQAVYYDWLAAPNPVEKHRKSMPYQLDELLNFRIPYYVGPLVTAKEQKAAQGGVFAWMVRKDPEGNITPYNFDEKVDREASANTFIQRMKTTDTYLIGEDVLPKQSLLYQRYEVLNELNNVRVNNEKLSIEQKQQVIRELFERHNSVTIKQFAENLRAHGDYAHIPEIRGLADEKRFLSSLSTYRQLKSLLPEAIDDPAKQADIENIIAWSTVFEDAAIFKTKLKEISWLGSEAITKLSNIRYRGWGQFSRKFLNGLTLGNGHTIIQELLLSTNNLMQILTDETLQKKMTELNADKLKTANINDAIDNAYTSPSNKKALRQVLRVVDDIKRAADGQDPSWLYVETADGGGTPGKRTRARQHQLQEIYANAAHELIDTAVRGELEDKISDKADFNDRLVLYFMQGGRDIYTGAPLNIDQLSSYDIDHILPQSLIKDNSLDNRVLVHAIINREKNATFASTIYAQKMNATWRQWHEAGLISGRKLRNLQMRPDQIDKYASGFVARQLVETRQIIKLTEQIVAAQYPDTKIIAVKAGLSHQLREELEFPKNRDVNHYHHAFDAFLAARIGTYLLKRFPNLQAFFTYGKFTKADVKKLRGFNFIRDITHAEDKIVAKDTGEVVWDKQRDVDELDRIYNFKRMLITHEVRFETADLFKQTVYGARDSKEAGGSKQLIPKKKDIQLIFMGAISERTRPILPL

SEQ ID NO: 480 - protein, 1366 aa, Lactobacillus casei
MTKLGKPYGIGVDIGSNSIGFAAVDENSHLIRLKGKTVIGARLFEEGKAAAYRRASRTTRRRLSRNRWRLSFLRDFFESHITPTDPNFFMRQKYSEISPKDKARYKYEKRLFNDRTDAEFYQQYPTMYHLRTRLLTDPSKADVREIYFAIHHILKSRGHFLTPGYAKDFNTNKVALNEIFPALQDAYAQVYPDLDITFDENKVNEFKTVLLNEKATPSDTQRALVNLLLAKEGDRDILKQQKQVLTEFAKAVVGLKTKLNVALGTEVDSSEATAWNFSLGQLDDKWAGIESAMTDEGTEILDQIRDLYRARLLNGIVPAGKTLSQAKVDDYAQHHEDLELFKDYLKQLEDDGTAKAIRQLYDRYIDGDDAKPFVREDFVKALTKEVTAHPNAKSPELLERLAQPDFMLKQRNKANGAIPVQMQQRELDQIIKNQAVYYDWLAAPNPVEKHRQSMTYQLDELLNFRIPYYVGPLVTAKEQKAAQGGVFAWMVRKDPDGNITPYNFDEKVDREASANTFIQRMKTTDTYLIGEDVLPKQSLLYQSYEVLNELNNVRVNDNKLSFDQKQQVLGELFERHNTVTIKQFVDNLLAHGDYDRIPEVRGLADEKRFLSSLSTYNQLKGILHEAIDDADKQTDIENIIAWSTIFEDKAIFKTKLNEISWLNAGMINSLANIRYRGWGQFSHKLLNELTLSTGRTVFEELLISSRNLMQILTDEVLKQKIAELNAHELKASGIYAAIDDAYTSPSNKKALRQVLSVIDDITNAAGQAPNWLYIETADGDGVPGKRTNSRQRKIQEIYANAAQELITGSVRGEFEDKIASRADFTDRLVLYFMQGGRDIYTGEPLNIDNLSSYDIDHILPQSLIKDNSLDNRVLVHPLVNREKDTIFASTRFAKQMNGMWRQWHAAGLISSRKLRNLQMRPDEIDKYASGFVARQLVETRQIIKLTEQIVADQYPDTKIIAVKAGLSSQLRKELDFPKNREVNHYHHAFDAFLAARIGTYLLKRYPNLEPFFTYGKFKKTEVKKLKSLKSLKSFNFIRDMTHAKDKIVAKETGEIVWDNASDINELDRIYNFKRMLITHEVRFETASLFKQTLYAAKNSKNRGGSRQLIPKKKGYLVDIYGGYTQETGSYLSVVRLTKKAMYAVVKVSTRDAAKLAVAKSISEQKENETLKKIIDGKLSKTSKKGKTTHQLFEIVLPRVGQKTLFKNSKYNQFLVNSDTYMHNYQELWMPREYQRMWKDILLSNHGDAQIEGQLDQIFKFIVSQVNSYFNLYDINQFRKKIADATDKFAKLPTHDTDNARGKIATIGQLLIGLQANAMRSDLRNLDIKTPFGLLQIGTGITLDLDTSIIYQSPTGLFEREVPLTDL

SEQ ID NO: 481 - protein, 1354 aa, Lactobacillus coryniformis
MTLHYNVGLDIGTNSVGYTIVDDNGKILQVKGKNGYGVRVFKEGATAAERRIFRTTHRRLKRRKWRLRLLQDFFEPYILPQDDGFFIRRKESNLVLNDRDEDTASLFNDRSDRDFYQAYPTIYHLRQALMTEKRQFDVREIYLAMHHIIKYRGHFLLNGTVNNFTNNKIDLHSDFEELNALLLNVIPELKFQIDLDHSTMFQTTLLNTTISRSGRQRDLVKSFYNGSDDKQLAKQQKSVATELLKAILGLKAKFHKLFNLDLLETTEWEFSFDAEDIDDKLAKLEPLMTENQQQVMDILQRIFAAITLNGIVPEGKTLSASKVDSYQKHKQDLKLLKAIAQHSDKKTATVLQTAYNEYINGIASKPLKQEDFYKRLTNAVKKSSDPQVADMLALIDQEKFLPKQRTKENGAIPHQLHQLELERIIDNQKDYYPWLAELNPNQARQKVAKYKLSELVAFRVPYYVGPLIEPEVQQATSNAHFAWMARKEAGPITPWNFDQKVDRNVSAERFIKRMTTKDTYLLAEDVLPLHSLLYQRFIVLNELNNVRVNGQKLTKKQKQAVYQDLFKRQPHVTKKQFKSYLVQTGEFAESSKIEGLANETSFNSGLTTENELRKIFGAQLDEARYQVDFEQIIEWATLFEDAKILRTKLAEITWLTTEQIEKLAGIRYRGWGRFSRKLLAGLRDQNGQQIIDLLWDTPNNFMVIVSQAAFSEAITKENEKLIDRRGAQDVITDLYTSPQNKKALRQVLAIVADVQKAMGGVPPQRIFIEFAREDEKNPRRSVERSRQLEKLYQTISNEFLINSEVRQELKEAVDQKVNFKDRLFLYFLQGGVDLYSGKRINIDQLSHYDIDHILPQSFIKDDSLDNRVLVSQKLNRSKSDSVPLSEFANYKFGPAMQAKWLQLKEAGLLSKRKYDNLTLDPTKLSKFAPLGFVNRQLVETRQVIKLAANLLASEETKVVTIKANMTHQVRKELDFPKNRNVNNYHHAFDAYLTAFVGIFLSKRYPKLKPYFTYGDFQKGNKLPDLKNFNFLYELKNKDRSIDSNTGEIIWDKQRDLAYMNKIYNFKKVTVVHEVLTKSGALYNQTLYKASEDKASGRGTKQLIRKKDNMPTELYGGYTGSTSAFMSIVRLWKKDKPYYKVVGIPTRMAAKLANQAQLLDYLTKKFTTRKLVKKTGDYKTTVERFELVVPKVGFNQLVIDGGQPFMLGSATYQYNARELFISKEAVKALNKQLSTHVDLVQVFDEILVQVNRWFPLYDTNGFREKLSHGRDRFMKLNDSFEEKSDTQIDVLNRILIGFHANAARTNLKILGLGTDLGFMTQQAGIRLTEKAILVHQSPSGLFERKVALRDLKGLR

SEQ ID NO: 482 - protein, 544 aa, Lactobacillus crispatus
KYYLYFMQLGRDAYTGKPINIDEVSQYYDIDHILPQSFIKDDSLNNRVLVAKPINNGKSDGVPLKLFGDNLATGLGITVKQMWNNWADKGLINKAKQNNLFLDPENINKHQASGFIRKQLVETSQIIKLATTILQAEYPKTKIIVVKASSNHYLRNEFDLYKSREVNDYHHAIDAYLTTICGNLLYQAYPKLRPFFVYGQFKKFSSDPKKENEILKKTKNFDFVAKLLGSKAPNEIRSQQGKVLFEKNKIRLQLNKAYNYKYMLVSRDTTTKNQEMFGMTIYPRAERDIAKSRKLIEKRKGFSTDIYGGYTGTAAAYMAIVRINKTKSSQYKVIAVPMTKRAILNKAEKEGNYEKILKQILSPSILYNDKGKRKAGVISFDIIKGKVPYNQVVQDGNKKFLLKSAIYLCNAKQLVLSEEAMRVITGHWLDSDKQDQELLDVYDEILEKIDRYLPLFDIRDFRNKLHKGREKFLKLNAEDKFKAIIQILKGLHDNSDTGELKDIGITVPFGQLQNNSGITLSSDTILVYQSPTGLFEKRVKISSL

SEQ ID NO: 483 - protein, 298 aa, Lactobacillus crispatus
MDELNKISVNGKKLSVSVKQELYEDLFKKNNTVSAKQLKNWLIENQKLPYIKIKGLADQTKFNSSLSTYIKLKKSGLFVDKLDSNEFRDDFEKIIEWSTIFEDKQIYIQKLQTIDWLTAKQIQFLQNIRLQGWGRLSKKLLTAIVDSNGQNIIEQLWNSQQIFMSIVNKADIKGTITDANQDLMHSNSMEDILSEAYTSPANKKMIRQVVKVVHDIQKAASGQAPKQIAIEFARESRRNSKLSQTRGHKLQDIYQKISGDIVNKNLKDKLAEYIKNNQLSVWEKTSFQMNKNDQDFLF

SEQ ID NO: 484 - protein, 279 aa, Lactobacillus crispatus
MNGKKLSVSVKQELYEDLFKKNNTVSAKQLKNWLIENQKLPYIKIKGLADQTKFNSSLSTYIKLKKSGLFVDKLDSNEFRDDFEKIIEWSTIFEDKQIYIQKLQTIDWLTAKQIQFLQNIRLQGWGRLSKKLLTAIVDSNGQNIIEQLWNSQQIFMSIVNKADIKGTITDANQDLMHSNSMEDILSEAYTSPANKKMIRQVVKVVHDIQKAASGQAPKQIAIEFARESRRNSKLSQTRGHKLQDIYQKISGDIVNKNLKDKLAEYIKNNQLNKDKYYTR

SEQ ID NO: 485 - protein, 538 aa, Lactobacillus crispatus
MQLGRDAYTGKPINIDEVSQYYDIDHILPQSFIKDDSLNNRVLVAKPINNGKSDGVPLKLFGDNLATGLGITVKQMWNNWADKGLINKAKQNNLFLDPENINKHQASGFIRKQLVETSQIIKLATTILQAEYPKTKIIVVKASSNHYLRNEFDLYKSREVNDYHHAIDAYLTTICGNLLYQAYPKLRPFFVYGQFKKFSSDPKKENEILKKTKNFDFVAKLLGSKAPNEIRSQQGKVLFEKNKIRLQLNKAYNYKYMLVSRDTTTKNQEMFGMTIYPRAERDIAKSRKLIEKRKGFSTDIYGGYTGTAAAYMAIVRINKTKSSQYKVIAVPMTKRAILNKAEKEGNYEKILKQILSPSILYNDKGKRKAGVISFDIIKGKVPYNQVVQDGNKKFLLKSAIYLCNAKQLVLSEEAMRVITGHWLDSDKQDQELLDVYDEILEKIDRYLPLFDIRDFRNKLHKGREKFLKLNAEDKFKAIIQILKGLHDNSDTGELKDIGITVPFGQLQNNSGITLSSDTILVYQSPTGLFEKRVKISSL

SEQ ID NO: 486 - protein, 206 aa, Lactobacillus crispatus
MQLGRDAYTGKPINIDEVSQYYDIDHILPQSFIKDDSLNNRVLVAKPINNGKSDGVPLKLFGDNLATGLGITVKQMWNNWADKGLINKAKQNNLFLDPENINKHQASGFIRKQLVETSQIIKLATTILQAEYPKTKIIVVKASSNHYLRNEFDLYKSREVNDYHHAIDAYLTTICGNLLYQAYPKLRPFFVYGQFKKFSSDPKKRK

SEQ ID NO: 487 - protein, 857 aa, Lactobacillus crispatus
MTKLNNEYMVGLDIGTNSCGWVATDFDNNILKMHGKRALGSHLFDEGVSAADRRAFRTTRRRIKRRKWRLKLLEEIFDEEMAKVDPNFFARLKESGLSPLDTRKNVSSIVFPTKKMDKQFYKKFPTIYHLRNALMKQDKKFDLRAIYIAIHHIVKYRGNFLSNSSISNFSASKIEIDRFVNELNDLYSIFLPESGVIFDAGNASKVEDIIRNEQMFKLDKIKEIADVLPDTENKSGLKLSKKISKEISKAILGYKAKFEIILQVNVDKTDSSIWNFKLNDENADVNLSEITSDLTDTQLQILDLVRNLFSAISLLNIVDEGSTLSESMIRKYNDHAQDLKLLKTVIKNHSDRKKAHNLQLAYDKYVNNRHFVDVETKKAFPNKHLYRKSDFYEIVKKNLDASKEAVQIRKEIALDKFMPKQRSDENGVIPFQLNQIELDKIIENQGKYYPFLKEINPIKAHRMQAPYKLDELIRFRVPYYVGPMIEPTNSSYPQTRQNQSFAWMVRKAKGRITPWNFDEKVDRQKSANNFIKRLTTKDTYLFGEDVLPANSLLYQKYTVLDELNKISVNGKKLSVSVKQELYEDLFKKNNTVSAKQLKNWLIENQKLPYIKIKGLADQTKFNSSLSTYIKLKKSGLFVDKLDSNEFRDDFEKIIEWSTIFEDKQIYIQKLQTIDWLTAKQIQFLQNIRLQGWGRLSKKLLTAIVDSNGQNIIEQLWNSQQIFMSIVNKADIKGTITDANQDLMHSNSMEDILSEAYTSPANKKMIRQVVKVVHDIQKAASGQAPKQIAIEFARESRRNSKLSQTRGHKLQDIYQKISGDIVNKNLKDKLAEYIKNNQLSVWEKTSFQMNKNDQDFLF

SEQ ID NO: 488 - protein, 857 aa, Lactobacillus crispatus
MTKLNNEYMVGLDIGTNSCGWVATDFDNNILKMHGKRALGSHLFDEGVSAADRRAFRTTRRRIKRRKWRLKLLEEIFDEEMAKVDPNFFARLKESGLSPLDTRKNVSSIVFPTKKMDKQFYKKFPTIYHLRNALMKQDKKFDLRAIYIAIHHIVKYRGNFLSNSSISNFSASKIEIDRFVNELNDLYSIFLPESGVIFDAGNASKVEDIIRNEQMFKLDKIKEIADVLPDTENKSGLKLSKKISKEISKAILGYKAKFEIILQVNVDKTDSSIWNFKLNDENADVNLSEITSDLTDTQLQILDLVRNLFSAISLLNIVDEGSTLSESMIRKYNDHAQDLKLLKTVIKNHSDRKKAHNLQLAYDKYVNNRHFVDVETKKAFPNKHLYRKSDFYEIVKKNLDASKEAVQIRKEIALDKFMPKQRSDENGVIPFQLNQIELDKIIENQGKYYPFLKEINPIKAHRMQAPYKLDELIRFRVPYYVGPMIEPTNSSYPQTRQNQSFAWMVRKAKGRITPWNFDEKVDRQKSANNFIKRLTTKDTYLFGEDVLPANSLLYQKYTVLDELNKISVNGKKLSVSVKQELYEDLFKKNNTVSAKQLKNWLIENQKLPYIKIKGLADQTKFNSSLSTYIKLKKSGLFVDKLDSNEFRDDFEKIIEWSTIFEDKQIYIQKLQTIDWLTAKQIQFLQNIRLQGWGRLSKKLLTAIVDSNGQNIIEQLWNSQQIFMSIVNKADIKGTITDANQDLMHSNSMEDILSEAYTSPANKKMIRQVVKVVHDIQKAASGQAPKQIAIEFARESRRNSKLSQTRGHKLQDIYQKISGDIVNKNLKDKLAEYIKNNQLSVWEKNSFQMNKNDQDFLF

SEQ ID NO: 489 - protein, 347 aa, Lactobacillus crispatus
MVNLKSLVLILKKENEILKKTKNFDFVAKLLGSKAPNEIRSQQGKVLFEKNKIRLQLNKAYNYKYMLVSRDTTTKNQEMFGMTIYPRAERDIAKSRKLIEKRKGFSTDIYGGYTGTAAAYMAIVRINKTKSSQYKVIAVPMTKRAILNKAEKEGNYEKILKQILSPSILYNDKGKRKAGVISFDIIKGKVPYNQVVQDGNKKFLLKSAIYLCNAKQLVLSEEAMRVITGHWLDSDKQDQELLDVYDEILEKIDRYLPLFDIRDFRNKLHKGREKFLKLNAEDKFKAIIQILKGLHDNSDTGELKDIGITVPFGQLQNNSGITLSSDTILVYQSPTGLFEKRVKISSL

SEQ ID NO: 490 - protein, 534 aa, Lactobacillus crispatus
RDAYTDKPINIDEVSQYYDIDHILPQSFIKDDSLNNRVLVAKPINNGKSDGVPLKLFGDNLATGLGITVKQMWNNWADKGLINKAKQNNLFLDPENINKHQASGFIRKQLVETSQIIKLATTILQAEYPKTKIIVVKASSNHYLRNEFDLYKSREVNDYHHAIDAYLTTICGNLLYQAYPKLRPFFVYGQFKKFSSDPKKENEILKKTKNFDFVAKLLGSKAPNEIRSQQGKVLFEKNKIRLQLNKAYNYKYMLVSRDTTTKNQEMFGMTIYPRAERDIAKSRKLIEKRKGFSTDIYGGYTGTAAAYMAIVRINKTKSSQYKVIAVPMTKRAILNKAEKEGNYEKILKQILSPSILYNDKGKRKAGVISFDIIKGKVPYNQVVQDGNKKFLLKSAIYLCNAKQLVLSEEAMRVITGHWLDSDKQDQELLDVYDEILEKIDRYLPLFDIRDFRNKLHKGREKFLKLNAEDKFKAIIQILKGLHDNSDTGELKDIGITVPFGQLQNNSGITLSSDTILVYQSPTGLFEKRVKISSL

SEQ ID NO: 491 - protein, 278 aa, Lactobacillus crispatus
SVNGKKLSVSVKQELYEDLFKKNNTVSAKQLKNWLIENQKLPYIKIKGLADQTKFNSSLSTYIKLKKSGLFVDKLDSNEFRDDFEKIIEWSTIFEDKQIYIQKLQTIDWLTAKQIQFLQNIRLQGWGRLSKKLLTAIVDSNGQNIIEQLWNSQQIFMSIVNKADIKGTITDANQDLMHSNSMEDILSEAYTSPANKKMIRQVVKVVHDIQKAASGQAPKQIAIEFARESRRNSKLSQTRGHKLQDIYQKISGDIVNKNLKDKLAEYIKNNQLNKDKYY

SEQ ID NO: 492 - protein, 277 aa, Lactobacillus crispatus
SVNGKKLSVSVKQELYEDLFKKNNTVSAKQLKNWLIENQKLPYIKIKGLADQTKFNSSLSTYIKLKKSGLFVDKLDSNEFRDDFEKIIEWSTIFEDKQIYIQKLQTIDWLTAKQIQFLQNIRLQGWGRLSKKLLTAIVDSNGQNIIEQLWNSQQIFMSIVNKADIKGTITDANQDLMHSNSMEDILSEAYTSPANKKMIRQVVKVVHDIQKAASGQAPKQIAIEFARESRRNSKLSQTRGHKLQDIYQKISGDIVNKNLKDKLAEYIKNNQLNKDKY

SEQ ID NO: 493 - protein, 1368 aa, Lactobacillus curvatus
MSRPYNIGLDIGTSSIGWSVVDDQSKLVSVRGKYGYGVRLYDEGQTAAERRSFRTTRRRLKRRKWRLGLLREIFEPYITPIDDTFFLRQKQSNLSPKDQRKLYTQTSLFNDRTDRAFYDDYPTIYHLRYRLMTEKRQFDIREIYLAMHHIVKYRGHFLNEAPVSSFKSSEINLVAHFDRLNTIFADLFSESGFQLETDKLAEVKALLLDNQQSASNRQRQALSLIYTPSTNKAVEKQNKAIATELLKAILGLKAKFNVLTGIEAEDVKAWTLTFNAENFDEEMVKLESSLDDNAHQIIESLQELYSGVLLAGIVPENQSLSQAMITKYDDHQKHLKMLKAVREALAPGDRQRLKQAYDQYVDGQENTKAYSKEDFYGDITKALKNNPDHPIVSEIKKLIELDQFMPKQRTKDNGAIPHQLHQQELDRIIENQQQYYPWLAELNPNSKRQTVAKYKLDELVAFRVPYYVGPLITAEQQRQSSDAKFAWLIRKAEGRITPWNFDDKVDRQASANEFIKRMTTTDTYLLAEDVLPKQSLIYQRFEVLNELNGLKIDDQPITTELKQAIFTDLFMQKISVTVKNIQDYLVSEKRYASRPAITGLSDENKFNSRLSTYHDLKMIVGDAVDDVDKQADLEKCIEWSTIFEDGKIYSAKLNEIDWLTDQQRVQLAAKRYRGWGRLSAKLLTQIVNANGQRIMDLLWDTTDNFMRIVHSEDFDKLITEANQMMLAENDVQDVINDLYTSPQNKKALRQILLVVNDIQKAMKGQAPERILIEFAREDEVNSRLSVQRKRQVEQVYQNISNELLNNTEIRNELKDLSNSALSNTRLFLYFMQGGRDMYTGDSLNIDRLSTYDIDHILPQSFIKDNSLDNRVLVSQKMNRSKADQVPTDFTSVELGQKMQIQWEQMLRAGLITKKKYDNLTLNPDHISKYAMKGFINRQLVETRQVIKLATNLLMEQYGEDNIELITVKSGLTHQMRTEFDFPKNRNLNNHHHAFDAYLTAFVGLYLLKRYPKLKPYFVYGEYQKASQQDKWRNFNFLNGLKKDELVDENTEAVIWDKESGLAYLNKIYQFKKILVTRGVHENSGALFNQTLYAAKDDKASGQGGKQLIPAKQDRSTALYGGYSGKTVAYMCIVRIKNKKGDLYKVCGVETSWLAQLKQLTDEDSQKAFLEQKISPQFTKVKKQKGNIIEAVEEFEVIAPHILINQRFFDNGQELTLGSATYKHNEQELILDKTAVKLLNGALPLTQSEELAEQVYDEILDQVMHYFPLYDTNQFRAKLSTGKAAFMKLPWKSQWDGNKMVQVGQQVILDRILIGLHANAAMSDLKVLKMTTPFGMIQQSTGITLSADTQIIYQSPTGLFERRVALRDL

SEQ ID NO: 494 - protein, 669 aa, Lactobacillus delbrueckii
MAKPKDYTIGLDIGTNSVGWVVTDDQNNILRIKGKKAIGARLFTEGKVAAERRSFRTTRRRLSRRRWRIKMLEELFDEEIAKVDPSFFARLHESWISPKDKRKRYSAIVFPSPEEDKKFHESYPTIYHLRDKLMKDDQKHDIREIYIAVHQMIKARGNFLHDESVETYRSGMSSLGGRSERNILSVQTLEELNDLFAENEGTEEVELNVASAEQINDILTGGHLNADSQKEISNLLLPSSFPSFDDKAKEKQVKKLINNVATNISKAWLGYKADFSTILNLAKVDKDQKKIFAFALQGGDEEDKVQELESLLEQSQTDIVDRLIEIRHAIVLSEIVPVGMTLSEAMIDKYDQHKEDLITLKAVIRNTKDKKKAAKLQAIYDLYVKKRHADLAKAMKLTGIKKRSELLDPEELKKGISSLLDDSPEAVEIKQRLEEKTFLPLQRSNNNGVIPNQLHQVELDEIIKKQSKYYPFLAEKNPDESEEAQKKAPTKLDALLTFRVPYYVGPMITKEEQEAQNGHSFAWMVRRDPQDHEAITPWNFEKKVDKMASATQFIKRMTTKDTYLLGEDVLPASSLKYQLFTVLNELNNLRVNGKKLTSDEKEQVIEGLFKKQKTVKADKFVKYWQAKHIGADIKVKGLSDPSKFNSTMSTYIDFKKIFGDQLNDVNRQR

SEQ ID NO: 495 - protein, 544 aa, Lactobacillus delbrueckii
MTGCADYDVDHIMPQSFVKDDSLDNRVLVARAVNNQKSDKVPALLFGNKVVADLGITVREMWDKWQKLGMISKRKLSNLLTDPDALTEYRAQGFIRRQLVETSQVIKLTATILQSEFPDSKIIEVPAKYNSIVRKQFDLYKSREVNDFHHAIDAYLSTIVGNYLYQVYPNLRRMFVYGEFKKFSSNAEESAHDVARRVKSMNFLDDLLRGTHGDNIYCRSTGEIVFNRNDIISKLKQAYSFKQMLVTQEVFTKKSALFDQTVYPSPERDSKKRSGLIPRKKGMDTEIYGGYSGNKDAYFVLAEAVKEKGHTLQIVGVPIRALNTLKNSANYSEKLLEIIKPQVMFNKDTGKPIKGIKDVKILMDKIPCRQPVLEGESYYMLASSKYRYSLKQISLSQMSMKYILDYIDDPNFNKHEMINIDQQDEKECLLSVYDEILEKMDKYLPLFDIRSFRKKLHDGRDAFIALPVASEEKKPGEVDVIRKILKGLHANADITNLAELGFGTAALGALVSTGGIKISDDAVFIYQSPTGLFERRVKVSDLLK

SEQ ID NO: 496 - protein, 1356 aa, Lactobacillus farciminis
MTKKEQPYNIGLDIGTSSVGWAVTNDNYDLLNIKKKNLWGVRLFEEAQTAKETRLNRSTRRRYRRRKNRINWLNEIFSEELAKTDPSFLIRLQNSWVSKKDPDRKRDKYNLFIDGPYTDKEYYREFPTIFHLRKELILNKDKADIRLIYLALHNILKYRGNFTYEHQKFNISNLNNNLSKELIELNQQLIKYDISFPDDCDWNHISDILIGRGNATQKSSNILKDFTLDKETKKLLKEVINLILGNVAHLNTIFKTSLTKDEEKLNFSGKDIESKLDDLDSILDDDQFTVLDAANRIYSTITLNEILNGESYFSMAKVNQYENHAIDLCKLRDMWHTTKNEEAVEQSRQAYDDYINKPKYGTKELYTSLKKFLKVALPTNLAKEAEEKISKGTYLVKPRNSENGVVPYQLNKIEMEKIIDNQSQYYPFLKENKEKLLSILSFRIPYYVGPLQSAEKNPFAWMERKSNGHARPWNFDEIVDREKSSNKFIRRMTVTDSYLVGEPVLPKNSLIYQRYEVLNELNNIRITENLKTNPIGSRLTVETKQRIYNELFKKYKKVTVKKLTKWLIAQGYYKNPILIGLSQKDEFNSTLTTYLDMKKIFGSSFMEDNKNYDQIEELIEWLTIFEDKQILNEKLHSSKYSYTPDQIKKISNMRYKGWGRLSKKILMDITTETNTPQLLQLSNYSILDLMWATNNNFISIMSNDKYDFKNYIENHNLNKNEDQNISDLVNDIHVSPALKRGITQSIKIVQEIVKFMGHAPKHIFIEVTRETKKSEITTSREKRIKRLQSKLLNKANDFKPQLREYLVPNKKIQEELKKHKNDLSSERIMLYFLQNGKSLYSEESLNINKLSDYQVDHILPRTYIPDDSLENKALVLAKENQRKADDLLLNSNVIDRNLERWTYMLNNNMIGLKKFKNLTRRVITDKDKLGFIHRQLVQTSQMVKGVANILDNMYKNQGTTCIQARANLSTAFRKALSGQDDTYHFKHPELVKNRNVNDFHHAQDAYLASFLGTYRLRRFPTNEMLLMNGEYNKFYGQVKELYSKKKKLPDSRKNGFIISPLVNGTTQYDRNTGEIIWNVGFRDKILKIFNYHQCNVTRKTEIKTGQFYDQTIYSPKNPKYKKLIAQKKDMDPNIYGGFSGDNKSSITIVKIDNNKIKPVAIPIRLINDLKDKKTLQNWLEENVKHKKSIQIIKNNVPIGQIIYSKKVGLLSLNSDREVANRQQLILPPEHSALLRLLQIPDEDLDQILAFYDKNILVEILQELITKMKKFYPFYKGEREFLIANIENFNQATTSEKVNSLEELITLLHANSTSAHLIFNNIEKKAFGRKTHGLTLNNTDFIYQSVTGLYETRIHIE

SEQ ID NO: 497 - protein, 1313 aa, Lactobacillus fermentum
MHYLDEIFAPHLQEVDENFLRRLKQSNIHPEDPAKNQAFIGKLLFPDLLKKNERGYPTLIKMRDELPVEQRAHYPVTNIYKLREAMINEDRQFDLREVYLAVHHIMKYRGHFLNNASVDKFKVGRIDFYKSFNVLNEAYEELQNGEGSFTIEPSKVEKIGQLLLDTKMRKLNRQKAVAKLLEVKVADKEETKRNKQIATAMSKLVLGYKADFATVAMANGNEWKIDLSSETSEDEIEKFREELSDAQNDILTEITSLFSQIMLNEIVPNGMSISESMMDRYWTHERQLAEVKEYLATQPASARKEFDQVYNKYIGQAPKERGFDLEKGLKKILSKKENWKEIDELLKAGDFLPKQRTSANGVIPHQMHQQELDRIIEKQAKYYPWLATENPATGERDRHQAKYELDQLVSFRIPYYVGPLVTPEVQKATSGAKFAWAKRKEDGEITPWNLWDKIDRAESAEAFIKRMTVKDTYLLNEDVLPANSLLYQKYNVLNELNNVRVNGRRLSVGIKQDIYTELFKKKKTVKVSDVASLVMAKTRGVNKPSVEGLSDPKKFNSNLATYLDLKSIVGDKVDDNRYQTDLENIIEWRSVFEDGEIFADKLTEVEWLTDQQRSALVKKRYKGWGRLSKKLLTGIVDENGQRIIDLMWNTDQNFMQIVNQPVFKEQIDQLNQKAITNDGMTLREWVESVLDGAYTSPQNKKAIWQVVRVVEDIVKAVGNAPKSISIEFARNEGNKGEITRSRRTQLQKLFEDQAHELVKDTSLTEELEKAPDLSDRYYLYFTQGGKDMYTGDPINFDEISTKYDIDHILPQSFVKDDSLDNRVLVSRAENNKKSDRVPAKLYAAKMKPYWNQLLKQGLITQRKFENLTMDVDQNIKYRSLGFVKRQLVETRQVIKLTANILGSMYQEAGTDIIETRAGLTKQLREEFDLPKVREVNDYHHAVDAYLTTFAGQYLNRRYPKLRSFFVYGEYMKFKHGSDLKLRNFNFFHELMEGDKSQGKVVDQQTGELITTRDEVAKSFDRLLNMKYMLVSKEVHDRSDQLYGATIVTAKESGKLTSPIEIKKKRPVDLYGAYTNGTSAFMTIIKFTGNKPKYKVIGVPTTSAVGLKRVGKPGSESYNQELHRIIKSNPKVKKDFEIVVPHVSYSQLIVDDDCKFTLASDTYQHPATQLVLSKESMEIIADDFKFVKENTATADEQLVRVFDEIVNQMNHYFTIFDQRSNRQKVTKARDKFVSLPTESEYEGAKKTQVGKTEVITNLLMGLHANSAQGDLKVLGLSTFGFFQSSGGLNLSEDAMIVYQSPTGLFERRICLKDI

SEQ ID NO: 498 - protein, 1327 aa, Lactobacillus florum
MTEQQQPYNIGLDIGTSSIGWAVTDQNDKLLHIRGHNGIGVRLFKEGESAAERRGFRTTRRRLSRRRWRLRFLDRIFDAELAKVDPNFLARLKQSNISPLDPNKQMFGNILFDDPQFDDQKFHQQYPTIYHLRSALAQPDAPQADVRLIYLALHHMIKFRGHFLNGAAVEKFHGGQLHLESEFQELNQIFSNQQRDHVQLQTSSLDEVATILKDNQRTPSDRQRELSARLFVPVDKTIDKENKKLATELLKAVLGLKAKFDVILGVEATDPQAFKLQFSSDDFDDKIAELASELTDEANEILTVLQRLYFSLNLADILTNRQTKQVADSISTAMINRYDDHKHHLKMLKELEAQVTQEQRDGLKKAYDEYIDGDKPTIDTFYTNIKKNLDDSELANQIKSLIDLQAFMPKQRSKENGSIPHQLHQRELDQLIEVQGKYYPWLLAAKDKLDALIAFRVPYYVGPMIDPNQSDDPQNTKFAWMVRKEAGEITPWNFEEKVDKTSSATNFIKRMTTTDTYLLGEPVLPKNSLLYQQFTVLNELNKLKVNGKALTVDQKKYLYEHVCKKQRRVTLKKLSDCLMARGDFPMGAIFTGTTDQKNMNNTLKTYQDFQEIFGDEIDNPDRQVDFEKMIEWSAIFEDREIFKLKLAELNWLTSEQLERVSKKRYQGWGRLSQKLLTHIVNENGERIIDQLWNTNQNFMEIMGQDSVKQAIQEHNGANVAQTGINETIDELYTSPQNKKAIRQILLVVDDIKKAVGYAPANIMMEFAREDRDDHRLIASRARQLEKTYQEISKNWFDNESVTQELKDQIKNKTKFTDRLYLYFIQGGIDLYTGHPLNIDQLSSYDIDHILPQSFLLDNSLNNRVLTSQAENRVHKEDRLPGETVANKMRPTWKMMREQGLMTQRKYNNLTLKPDQISKFNNRGQFINRQLVETRQVIKLAADIMSQKYQADQTKVVTVKANLTHHMREKFNFYKSRNVNDYHHAFDAYLTLFVGNWLLKEYPKLQPYFVYGDFAKTGTNNLKSFNFLYRFERDHKLNDKGAIDTDKDQQLGYMKRIYRFKKMLVTKQLETNEGALYGQTLYPAPKNDKKTRNLINSKKNRPSDIYGGYSNENGSFLTLVKLKKGSKYDYRLVAVPVSKISEIKESELATIEKAIAPQFLKSSGKYRDFQVVLSKILINQKVIDDGMIFTIGSKSYKHNAKQVVLSDNSIQIVSTLSRISDKEKLITVFDEIVDITSKYLPWYKVNDVEKTKMLFRQMQDIDEMKKIIDNSLIGLHCNASITDLGKVGLSKYWGRFVLTAGISLTVDAQLIYQSPTGLFEHRVKVSDL

SEQ ID NO: 499 - protein, 1386 aa, Lactobacillus hominis
MTKITEDYIVGLDIGTNSCGWVAMDSKNTILRMHGKTAIGSHLFDAGNSAADRRAFRTTRRRIKRRKWRLKLLEEIFDSHLAKVDPYFFARLKESGLSPLDTRKNVSSIIYPTSLEDKKFYVDNPTIYHLRYKLMTEDRKFDLREVYLAIHHIVKYRGNFLYNTPVKAFEASKIDVKGSLKKLNELYEGLDSEFNVELDSNNALEIENIIRDKKIFKINKVKEINQLLSLKTEDKERTKLMKDVSKQIVNAILGYKTKFETILLKDVSKDEADDWEFKLTDVDADNKFENLIGDLNENEQEILLVIRKLANAITLSNIVEEGKTLSESMKDKYKKHSDDLKLLKQVISDHPDRDKAKKLALAYDLYVNNRHGKILQAKDILEKKKTLSKEDFYKEIKKNLDDSKESQEILDAISLDSFMPKQRTNENGVIPYQLHQLELDKIIENQGKYYPFLKEVNPVSSHLKQAPYKLDELIRFRVPYYVGPLISPNESTKNKQTKKNQNFAWMIRKEQGQITPWNFDQKVDRMASANKFIKRMTTIDTYLLGEDVLPANSLLYQKFTVLNELNNVKINGKRISVPLKQELYNNLFKKNSTVTTNKLKSYLKENYKLIKVEIKGLSDEKKFNSGLTTYNKLKNLKIFDQQIDDPNYNKDFERIIEWSTIFEDKAIYKEKLKTIDWLSDRQIDKLSKIRMQGWGQLSKKLLSQLTDNNGQTIIEQLWDSQNNFMQIVNQADFKDAIAVANQNLLVDTSVEDILNEAYTSPANKKAIRQVVKVVDDIVKATSGKVPKQIAIEFTRDADDNAKISQSRANKLRKVYKEMSNELASETIRNELERVAKDQKLLKDKHYLYFMQLGRDAYTGELIDIDNLEQYDIDHVLPQSFIKDDSLENRVLVKKAVNNGKSDNVPVKLYGNRMATDLGMTIRHMWEKWKEQGLITKTKYNNLIIDPDKINKYESSGFIHRQLVETSQIIKLVSTILQSKYPDTEIIVVKARYNHYLRKRLNLYKSREVNDYHHAIDAYLSAICGNLLYQVYPYLRPFFVYGQYKKFSSEPEKEKIIYDKTRRYNFISQIFENKDNDIISRETKKKVFDKKDIIEKLKRAYNYKYMLVSRETETHDQEMFKMTVYPRLSRDTKKSRNLIPKKKDMPTEIYGGYTNNSDAYMIIARINKKKGPEYRVFGVPMRELVNLRKAEKNGHYKAYLKQVLEPEIMYSKNGKKNKTISSFEIVKAKVPYKQVILDGDKKFMLASSTYVQNAKQLTLSQYSMQAITDNCENDTEEEKALVEAYDEILTNIDKYLPLFDINKFREKLHAGREKFVDLPLAEKKETILQVLNGLHDNAVMPKIKSLGLSTPLGFMQFHTGVSLSENAKLIYQSPTGLFEKRLKISDL

SEQ ID NO: 500 - protein, 270 aa, Lactobacillus iners
MITYLKDNDDITLSFPKDQLINIFKNSNLNSTEKSDQLKPFFGRTNLEKGIIKLLSGGKQDLSNMFRDETLKNSNYKNLKFSDNRFDDERDGYAADLGDRIDLLILLKQIYDASILESMMSQARVSIDGHKYISSAKVCAYEKHKSDLKRLKSLIKKYLPSEYNNIFRKITEKDNYVAYSKSNITNNKREKALKYVKYVDFTKYLTKKLKTIKTQDAEDDQEIFEIKGELEKQSFLPKQRTLDNSIIPYQLHLMELKKYLIINLNIMTFC

SEQ ID NO: 501 - protein, 255 aa, Lactobacillus iners
MITYLKDNDDITLSFPKDQLINIFKNSNLNSTEKSDQLKPFFGRTNLEKGIIKLLSGGKQDLSNMFRDETLKNSNYKNLKFSDNTFDDERDGYAADLGDRINLLILLKQIYDASILESMMSQARVSIDGHKYISSAKVCAYEKHKSDLKRLKSLIKKYLPSEYNNIFRKITEKDNYVAYSKSNITNNKREKALKYVEYVDFTKYLTKKLKTIKTQDAEDDKEIFEIKGELEKQSFLPKQRTLDNSIIPYQLHLME

SEQ ID NO: 502 - protein, 343 aa, Lactobacillus iners
MLAKDDQEGITVKDKIISLLTFRLPYYIGPVNPAVHGKFAWVKRLANGKVTPWNYKEKIDIDASHEEFIKTKLSKCSFLIGCDVLPKNSLLYQKYMVLSELNTIKFNGVNISEKLKDDIYQNLFKNIQKVTKKRLQNYIKEHENIIGDVIVTGIDNAFKQGLVSYLKFKKIIGDKIDDDRYQKVLEKIIRDITLYDECAGKKIKKEYKDSDLFTEDELNKIVKLTFNDWGRLSAELLDQLEGEDTVSGETGKIIEFMQKHNYNLMQLMSKKFTFKYKIDEINKSYYQHDKFNYKSMIDSLYVSPATKRILWQSLKVVHEISKIMKHDPEKIFYRNGTFQRRSS

SEQ ID NO: 503 - protein, 447 aa, Lactobacillus iners
MLYDHKLIGDKKYARLIRSKAFTDDELAGFIARQLVETRQATKETADLLKRLCPKSRIVYAKAQNASIFRQKFDIPKSRTINDLHHAQDAYLNIVVGNIFDTKFTQDPRNFIKNTKDSRNYNLEKIYDYNVERNNYVAWIAPDSKTNGTIANVKCNLSTKDFRVTRPSFYKKGALFNQNLSRKGSNLAPIKEHSPKSNPLKYGGYSGKNNSFFVVVAGKDNKGKDIVKLIPVNTLIYNKMLHCDYKAKQELLTSYVANNFAINNFRIVKDDIKMYSLVKIDGAYYYLVGGTDERIEVKNAMQLLLSKDSIKAVKILEKESKDQFANIKNYKDIDIKLGRTFNEVISKYTNSVFGKSMLISDKYRKDIFKSVDKSILEFNSLNTIAKADNLLKFVTSMRPAGSVDALKMVGLIERIRKSNVISNFNEFKLINQSVTGLFENEEDLLKL

SEQ ID NO: 504 - protein, 667 aa, Lactobacillus iners
MQKHNYNLMQLMSKKFTFKSKIDEINKSYYQHDKFNYKSMIDSLYVSPATKRILWQSLKVVHEISKIMKHDPEKIFIEMARSKEDHPKRKLSRKADLKQVYKDSKKQIISIIGKDKYQDLSNELDNKDDRDLRWDNLYLYYTQLGRSMYSLKPIDISELMNKNLYDQDHIFPKSKKYDDSIENRVLVEKELNVKKSDIYPISDANIIPQKIKGQVESFWKMLYDHKLIGDKKYARLIRSKAFTDDELAGFIARQLVETRQATKETADLLKRLCPKSRIVYAKAQNASIFRQKFDIPKSRTINDLHHAQDAYLNIVVGNIFDTKFTQDPRNFIKNTKDSRNYNLEKIYDYNVERNNYVAWIAPDGETNGTIANVKCNLSTKDFRVTRPSFYKKGALFNQNLSRKGSNLAPIKEHSPKSNPLKYGGYSGKNNSFFVVVAGKDNKGKDIVKLIPVNTLIYNKMLHCDYKAKQELLTSYVANNFAINNFRIVKDDIKMYSLVKIDGAYYYLVGGTDERIEVKNAMQLLLSKDSIKAVKILEKESKDQFANIKNYKDIDIKLGRTFNEVVSKYTNSVFGKSMLISDKYRKDIFKSVEKSILEFNHLDTIGKADNLLKFVTLMRPSGSAHSLKMVGLIERIRKSNVISNFNEFKLINQSVTGLFENEEDLLKL

SEQ ID NO: 505 - protein, 1395 aa, Lactobacillus jensenii; identical to SEQ ID NO: 118

SEQ ID NO: 506 - protein, 1382 aa, Lactobacillus mucosae
MDIGTNSIGWTAIDDHFSLLRVKGKNAIGVRTFKEGETAADRRGFRTARRRLSRRRWRLQFLDEFFAPYLAEVDPNFLARLKQSDISAKDPAKNQEYMGKLLFPDQEAASDGNGYPTLIQMRKAMPAEKAADFPVFNIYQLRYALMNEKRKFDLREIYLAVHHIVKYRGNFLNNTSVDKFKADQIDFNKSFETLNDLFRQVQPIAPFQIDLTKVDELGKLLLDTKQKKLDRQKAVAKLLPLIEDGTDKEIVKAHQQTAREISKLILGYKAKVGLILQNNLDQTLDMSTENSDDQLMQIAEELDDYQMELINQLSLLYSQIMLNEIVPNGETVSASMLNRYYKHRCQLKELKDYGAAQDKKTREQLDHLYAEYIGQIPKDSKFDFTKDLKKLMDKSDLGQKIKDEIEAGDYLPKQRTSANGVIPHQMHQQELDQIIENQKEYYPWLAEPNPVEKNIKNAKYKLDQLVSFRVPYYVGPMITLADQQKTSKASFAWAVRKKAGKITPWNFYDMIDREKSANNFIKRMTNKDTYLLSEDVLPASSLLYQKFTVLNELNNIRVNGRKLQPALKQAIYTDLFQKRKTVNLKTLTNFLAIHEPTLTKPKIEGLSNGRSFNSSLGTYIDMSKILGDSLDDLNYRDDIEKIIEWSTVFEDSEIYGVKLQEIQWLTNEQREKLVRKRYQGWGRLSKKLLTGITDENGQRIIDLMWDTSKNFMQIVHQPVFEEQIAELNQQLLQDADKAPLEVVDDILADAYTSPQNKKAIRQVVKVVADVVKAVGNAPASISIEFARNEDRNKELKNSRRHSIEKLYHETAEKLVKQTNLLEELGNVKDLNDRYYLYFTQAGRDMYDGTPINIDEISTHYEIDHILPQSFLKDNSLDNRVLVKKSENAAKSDRVPAKLYGAKMRAFWKQLKESQLISNRKYLNLTTDPEQVDKYQMQGFVHRQLVETRQIIKLAANIFGSLYPDSAVIETRAELTKQLREKFSLYKVRDVNDYHHAVDAYLTAFAGHYLYQRYPKLRPMFVYGDYAKIYADDLKRLRSVNLFHDLEKDQYNSGTAVNPETKEKIVDVDWLSDYVSKIQHFKYMLISKAVYTQHGQLYGATILPVAQVDKISAPIGIKDDKPVDIYGAYTNEVAAYMAIVRVNGKKPKYKVVSVPVRMLQRLKMAEQKGHDQYMQTLHDVLLRNFTSLKKNRKTGLKEAVVKDFDVLVPCVRYNQLVIDGDTKFTLGSATYQHNAKQLVLCNHSLETLANNFEYVRKHPDEADERMIMLYDDILDQVNHYFTLYDKNKFREKLNAGRDKYLKLPTFSQFENNKKTAIGKSEAIINILRGLHANAAITNLKCLGVSTPFGQLQSPSGIELSENAKLVYQSPTGLFSREVLLKDL

SEQ ID NO: 507 - protein, 1382 aa, Lactobacillus pentosus
MKKIVNYNLGLDIGTSSIGYAAIDDQGRPVRHQNKTVMGVRLFKEGKTAESTRIFRGTRRRLSHRHWRLGYLDRIFDNEIAKVDENFLPRLKASKRARSDEKRSFRGSLLFPETGDDAYYQKYPTIYHLRYALITQKKQFDIRLIYLALHHMIKYRGNFLDTTPVSAFNIHDIDLTDQFASLNDCYQLLDMDFEFQFDLNNIEQVQKLLLDETLSKTKRQAAVSKVLVMSTGNKAFDDQQNGIASEFIKALLGGPFDLSKILNLSVADVKSWKLHMTDKDVDDTLNSLVEELDENHKQIVNLLQMIYSQVMMLGLLNGQQSISASMIERYDDHAKHWAALKKLLPALGEQEQSTIIHAYTAYTGHSRTKQLSRAEFYTKVNSILKKHENIAEATGLIELIDRNEFMPKQRDAVNGVIPHQLHQRELQLIIQNQQKYYPFLAAKAYPDADETMIEQLLSFRVPYYAGPLVDRDFINESSDQEQAMQNTKFSWLKRREAGEITPWNFEQKVDVQETANRFIKRLTTKDTYLMTEDVLPKESLIYQRFEVLNELNAIRINDRRLTAENKQLAFQQLFMAGNTKNVSIKKFRNFVFDSLKFPEKVKITGFAGQHNFLAKLSTYHDFKKIFGERVDHTDLQPDFERIVEWCTIFEDRHIYREKLKEIQWLSQSEIDQLVLIRNHGWGRLSKRLLTGIRDSDGRTVMDQLWFGTDNFMRIISQSDFAAAIANENRTQLNQHGLEDVLDSAFMSPQNKKAIRQVLKVVDDIEQTLGCPPKKVMIEFTRSPDKKKQRTVTRLEKVQQAYKAVADQLAGQSIVSELDQYANTHSKLSDTYYLYFMQLGRDLYSGKPIDIDSPMLDDDHILPRAFMKDNSLDNRALTEKPINNTKAAKFPSKVFGQQKEVTDFWKLLRRCGLMSNIKEKHLYLDPDNVDKWTRRGFIHRQLVETSQVIKIVANILNDRYQQSQTEVLEVPARLGTELRECFGWYKVREVNDYHHVFDAYLAAFIGNYLYRRYPKLQPYFVYGNFAELNKAQLKNIKSFNFLYNITDNKRVVKDIETGQTLWDDQIRQQIQHIYEYKYMLTSHEAFTQHKELYGQTIYPRREFKPGTLKAIKQDQPQELYGGYKNLTAAYMCIVKIQARKRRAAEYRVVRVATESLSALQQAKRLGVQAYERCLRQELVRNNEILRTNADPNSAPREFEVLLDRVLCHQMIISDGQKYLLGSHAYKINCMQLVLSNNSMKILSTSIVKLKQMTNEPLVQVYREILDVVNKYFTLYDVNSFRENLNQFFDKFRTLPITNEYESSKSGKKLIHRGQLETLTLILRGLHANSDKVQYGDQSTLLGGFQTKDGIKLSKDSVIQYTSPAGLNVRTVKLRDLEQKEAQK

SEQ ID NO: 508 - protein, 1361 aa, Lactobacillus pentosus
MNEPYGVGLDIGTNSVGWTVVDMNGRVRKVKGKTALGARLFKEGATAEDRRGFRTTRRRLKRVKWRLRLLREFFDQPISKIDPNFFARRKYSDISPRDPNYNGLAKTLFNDRTDKEFYDDYATIYHLRDKLMTSNRKFDIREIYLAIHHIVKYRGNFLRTGPASQYGSASLHLATSFQKLNDLFAQSEETLNLKLVTDEALLQQIQQILVRTDLSRSEQQRQIWPLMAVLTGASAAEKKRQKNVVVELSKALVGLKAKMNVVTLTEVDAAVVKDWTFTMEESQDKLPEIEEQLSEVGQQIMDEVIQLYASVNLAQLIPAGKRFSQHMVEKYKHHEKNLELLKAYIHSQSDSKRGREIRATYDRYIDGVDSKPVTQEMFYKDLMKYVEADATSNHLAAEIKDEIDSEQFMPKLRTKQNGSIPYQVQQYELDQIISHQKKYYPWLGEENPVAERRGKFPYKLDELVGFRVPYYVGPLITKEDQQATSGAGFAWMVRKADGPITPWNFDQKVDRIASATAFIQRMQTTDTYLIGEDVLPARSLIYQRFMVLNELNNMRVEDRKLAPQQKQRLYNQVFKQHQHVSVKNIQQNLMDAGEYRKTPQITGLADPKGFNSSLSTYHDFKKILLEAIADEHKRADIEKIILWSTTFEDSAIFKQKLEEVAWLTDAQRKQLSGLRYRGWGQLSHKLLTAFKDDKGRSIMDGLWETSDNFMQLRKQPAIETQIKEANQANLTDADIQDTINELYTSPQNKKAIREVMLVLDDIKNAMHGQTPSWIFVEAARGGGVAGRRTQSRSSQIVEAYKGTAKEIVSEKVQHELNEKIKAKADFNTRLVLYFLQNGRDLYTNEAINIDRLSEYDIDHILPQSLVKDDSLDNRVLTSARINREKNDTFASEKFGRKMGAQWRELHRNGLMTQRKLKHLLMRPDEISKHATDFINRQLVETRQVIKLVEELISSEYPAASIVAVKANLTHQFRQTFNFPKLREVNDYHHAFDASLTAFIGMYLLKQYPKLERFFVYGKFAKQPINLTRFNIIRKLAVAEKPIANIETGEILWDKTADIKYFEKLYNYKRLLVTHEVRENYGAMFKQTLFKASYNKSKTLVPKKNHMETSVYGGYSNQETAYLAIVRIPFKSGFKFIVVGIPTRMVAKIKHYQSLGATLNQATHKVIEPKFTKISRKTKQTVISDYEVVLPKVYLDQVVRDQVKGQMYRFSLGSDKEYHNVQELYLPLSIQQAFVGHYDESDDQRSNDLVKVYDAALKQLQRYFPLHLSRNFDQVASQAHQSFEGLKNNVQTSDKQLGKKEVLNSLFVGLHANATRSNLSVLGMSKDFGRIKSNGITLTDQAEIIYQSPTGLFERKVALKDL

SEQ ID NO: 509 - protein, 1358 aa, Lactobacillus pentosus
MNEPYGVGLDIGTNSVGWTVVDMNGRVRKVKGKTALGARLFKEGATAEDRRGFRTTRRRLKRVKWRLRLLREFFDQPISKIDPNFFARRKYSDISPRDPNYNGLAKTLFNDRTDQEFYHDYPTIYHLRDKLMTSDRKFDIREIYLAIHHIVKYRGNFLRTGPASQYGSASLHLATSFQKLNDLFAQSEESLNFKLVTDEAQLQQIQQILVRTDLSRSEQQRQIWPLMVVLMGATAAEKKRQKDFAKELANALVGLKAKLNVVTLTNVDTTVVKDWTFTLEESQDKLPEIEEQLSEVGQQIMDEVIQLYASVNLAQLIPAGKRFSQHMVEKYNHHEKNLELLKAYIHSQSDSKRGREIRATYDRYIDGVKSKPVTQEMFYKDLMKYVEADATSNHLAAEIKDEIDSEQFMPKLRTKQNGSIPYQVQQYELDQIISHQKKYYPWLGEENPVAERRGKFPYKLDELVGFRVPYYVGPLITKEDQQATSGAGFAWMVRKADGPITPWNFDQKVDRIASATAFIQRMQTTDTYLIGEDVLPARSLIYQRFMVLNELNNMRVEDQKLAPRQKQRLYNQVFKQHQHVSVKNIQQNLMDAGEYRETPKITGLADPKGFNSSLSTYHDFKKILPEAIADEHKRADIEKIILWSTTFEDSAIFKQKLEEVAWLTDAQRKQLSGLRYRGWGQLSHKLLTAFKDDNGRSVMDGLWETSDNFMQLRKQPAIETQIKEANQANLTDADIQDTINELYTSPQNKKAIREVMLVLDDIKNAMHGQTPSWIFIEAARGGGVAGRRTQSRSKQIVEAYKSTAKEIVSEKVQHELNEKIKAKADFNTRLVLYFLQNGRDLYTNEAINIDRLSEYDIDHILPQSLVKDDSLDNRVLTSARINREKNDTFASEKFGRKMGAQWRELHRNGLMTQRKLKHLLMRPDEISKHATDFINRQLVETRQVIKLVEELISSEYPSASIVAVKANLTHQFRQTFNFPKLREVNDYHHAFDASLTAFIGMYLLKQYPKLERFFVYGKFAKQPINLTRFNVIRKLAVAEEPIANIETGEILWDKTADIKCFEKLYNYKRLLVTHEVRENYGAMFDQTIFKATDSRKRLIQKKKGFATETYGGYTGRTLAYLAIVKVVTNKDTQYQVVGIPTTMVTQIQQLEASGLTSKQAVTKAIGAMINENNKKLQSYEVLLPKVRFEQVVRDEVKGHIHRFALGTDTYYHNIQELYLPLTIQRAFLGKRNDTDAQTEQNLLTVFETTLAQVNRYFPLYEMNKFKQILNSAQEKFAALPTKNKTVKNKLVTGKDGVLNNLFIGLHANASLGDLKILGMKIGFGKLQVPGGLKLTDQAEIIYQSPTGLFERKVALKDL

SEQ ID NO: 510 - protein, 1358 aa, Lactobacillus plantarum
MKEPYGVGLDIGTNSVGWTVVDASGHVRKIKGQTGIGVRLFKEGAAAADRRGFRTTRRRLKRVKWRLRLLREFFDQPISKVDINFFARRKYSDVSPRDPNYNGLEKTLFNDRSDQDFYHDYPTIYHLREALMTQHRKFDVREIYLAIHHIVKYRGNFLRNDAATAYRSGTLDLQQHFETLNHLFSQADLELNLNLTTDVALLDSIKQTLVRTDISRSDRQKLIMPLLAVLTGATTAEKKRQKAVVTEFAKALVGNKTKIDVLTLTDIDATEAKDWAFSLEENQDKLPGIEDRFSEVGQQIIDEVIRLYASVNLAQLIPEGKRFSQSMVEKYKRHGEDLKLLKAYIRSQSDAKRGRAIRATYDQYIDGVKSKQVTQEAFQKALGKFVDADVDLNSWAAQIKQAIDSEQFMPKLRTKQNGAIPYQVQQNELDQIISNQKEYYPWLGEENPVIKRRGKFPYKLDELFGFRVPYYVGPLITKEMQAATANAGFAWMVRKADGPITPWNFDDKVDRVASATAFIQRMQTTDTYLIGEEVLPARSLIYQRFMVLNELNNIRVDDGQLTPRQKQRLYNQVFKKHKRVTAKNIQDNLVAAREFPTAPRITGLADPKVFNSSLSTYHDLKQVLPEAMSDVRKQADIEKIILWSTIFEDSTIFKQKLTEISWLTAAQLKQLGQLRYRGWGQLLRKLLTGLKDDNNRSIMDGLWETNANFMQLRSQPAIENQIKSANQANLTTADLQDTINELYTSPQNKKAIREVMVVLADIKDAMHGQTPNWIFVEAARGGGVAGRRTQSRSKQIVAAYQGTAQAIVRDQVQRELKEKIKNKANFNTRLVLYFLQNGRDLYTGDAINIDRLSEYDIDHILPQSLVKDDSLDNRVLTNARINREKNDTFASEKFGKKMGAKWKEMHRMGLMTKRKLDHLLMRPDEISKYATGFINRQLVETRQVIKLVEELINAEYPSTAIVSVKANLTHQFRQTFDFPKIREVNDYHHAFDAALTAFIGTYLLKRYPKLERFFVYGKFAKQPVNLTRFNVIRKLAKTDTPITDIDTGEVLWDKLTDIKYFETLYDYKRLLVTREVSENYGAMFDQTLLKASDNGKRLIRKKQSFDTAIYGGYTGKTLAYMAIVKVSTKKDVQYQVVGVPTTMVTQIEQLEQQGMTNKQAVTKVIEPLIAANNKKMLTYEVLLPKVRFEQVVRDRIKGQTHRFALGTDTYYHNIQELYLPLTLQRAFLGKQNESEVQLNQNLLTVFDATLAQVNRYFPLYEMNKFKKILNSARDQIELLEAKNQFVKNKLVLGKQGILTNMFIGLHANASYGDLKVLGVKIDFGKLQVPGGIKLTGDAEIIYQSPTGLFERKIALKDL

SEQ ID NO: 511 - protein, 1361 aa, Lactobacillus rhamnosus
MTKLNQPYGIGLDIGSNSIGFAVVDANSHLLRLKGETAIGARLFREGQSAAERRESRTTRRRLSRTRWRLSFLRDFFAPHITKIDPDFFLRQKYSEISPKDKDRFKYEKRLFNDRTDAEFYEDYPSMYHLRLHLMTHTHKADPREIFLAIHHILKSRGHFLTPGAAKDFNTDKVDLEDIFPALTEAYAQVYPDLELTFDLAKADDFKAKLLDEQATPSDTQKALVNLLLSSDGEKEIVKKRKQVLTEFAKAITGLKTKFNLALGTEVDEADASNWQFSMGQLDDKWSNIETSMTDQGTEIFEQIQEHYRARLLNGIVPAGMSLSQAKVADYGQHKEDLELFKTYLKKLNDHELAKTIRGLYDRYINGDDAKPFLREDFVKALTKEVTAHPNEVSEQLLNRMGQANFMLKQRTKANGAIPVQLQQRELDQIIANQSKYYDWLAKPNPVEKHRASKPYQLDELLTFRIPYYVGPLITPKEQAESRENVFAWMIRKDPSGNITPYNFDEKVDCPASANMFIQRMKNTDTYLIGEDVLPKRSLLYQKYEVLNELNNVSIDGRRLGADQKQRLIREVFERHSSVTIKQVAENLVAHGDFAKRPEIRGLADEKRFLSSLSTYHQLKKILHEAIDDPTKEHDIENIITWSTVFEDAAIFKTELAKISWLDSDTIKALSNIRYRGWGQFSRKLLDGLKLGNGHTVIQELMLSNHNLMQILTDETLKTTMAELNQDKLKADDIEDVINDAYTSPSNKKALRQVLRVVEDIKHAANGQDPSWLYIETADGPGTAGKRTQSRQKQIQTVYANAAQELIDSAVRGELEDKIADKASFTDRLVLYFMQGGRDIYTGAPLNIDQLSHYDIDHILPQSLIKDDSLDNRVLVNATINREKNNVFASTLFASKMAATWRKWHEAGLISGRKLRNLMLRPDEIDKFAHGFVARQLVETRQIIKLTEQIAAAQYPNTKIIAVKAGLSHQLREELDFPKNRDVNHYHHAFDAFLAARIGTYLLKRYPKLAPFFTYGEFAKVDVKKFREFNFIGALTHAKKNIVAKDTGEIVWDKERDIQELDRIYNFKRMLITHEVYFETADLFKQTIYAAKDSKERGGSKQLIPKKQGYPTQVYGGYTRENTAYLAVVKTVEKKADVYRVVRIATSQVAALKEARAQSTVKERELLKKFLTTKFTKIGKNGKKAITPFDIVIPRVPREQLFHNKRYGFFMVNSDTLMHNYQELWMSRSDQQILSKLVKSAKTVENGQVGRLFENIVEQINKYFPLYDINQFRKKLDQSKDIFSKLPLEGNGTTSGKRETIQNILTGAGTGAKNGDLKNLGIKTPFGFLQVPSGIVLDDDTTLIYQSPTGMLNRIVRLSEL

SEQ ID NO: 512 - protein, 1361 aa, Lactobacillus rhamnosus
MTKLNQPYGIGLDIGSNSIGFAVVDANSHLLRLKGETAIGARLFREGQSAAERRESRTTRRRLSRTRWRLSFLRDFFAPHITKIDPDFFLRQKYSEISPKDKDRFKYEKRLFNDRTDAEFYEDYPSMYHLRLHLMTHTHKADPREIFLAIHHILKSRGHFLTPGAAKDFNTDKVDLEDIFPALTEAYAQVYPDLELTFDLAKADDFKAKLLDEQATPSDTQKALVNLLLSSDGEKEIVKKRKQVLTEFAKAITGLKTKFNLALGTEVDEADASNWQFSMGQLDDKWSNIETSMTDQGTEIFEQIQELYRARLLNGIVPAGMSLSQAKVADYGQHKEDLELFKTYLKKLNDHELAKTIRGLYDRYINGDDAKPFLREDFVKALTKEVTAHPNEVSEQLLNRMGQANFMLKQRTKANGAIPVQLQQRELDQIIANQSKYYDWLAKPNPVEKHRASKPYQLDELLTFRIPYYVGPLITPKEQAESRENVFAWMIRKDPSGNITPYNFDEKVDCPASANMFIQRMKNTDTYLIGEDVLPKRSLLYQKYEVLNELNNVSIDGRRLGADQKQRLIREVFERHSSVTIKQVAENLVAHGDFAKRPEIRGLADEKRFLSSLSTYHQLKKILHEAIDDPTKEHDIENIITWSTVFEDAAIFKTELAKISWLDSDTIKALSNIRYRGWGQFSRKLLDGLKLGNGHTVIQELMLSNHNLMQILTDETLKTTMAELNQDKLKADDIEDVINDAYTSPSNKKALRQVLRVVEDIKHAANGQDPSWLYIETADGPGTAGKRTQSRQKQIQTVYANAAQELIDSAVRGELEDKIADKASFTDRLVLYFMQGGRDIYTGAPLNIDQLSHYDIDHILPQSLIKDDSLDNRVLVNATINREKNNVFASTLFASKMAATWRKWHEAGLISGRKLRNLMLRPDEIDKFAHGFVARQLVETRQIIKLTEQIAAAQYPNTKIIAVKAGLSHQLREELDFPKNRDVNHYHHAFDAFLAARIGTYLLKRYPKLAPFFTYGEFAKVDVKKFREFNFIGALTHAKKNIVAKDTGEIVWDKERDIQELDRIYNFKRMLITHEVYFETADLFKQTIYAAKDSKERGGSKQLIPKKQGYPTQVYGGYTRENTAYLAVVKTVEKKADVYRVVRIATSQVAALKEARAQSTVKERELLKKFLTTKFTKIGKNGKKAITPFDIVIPRVPREQLFHNKRYGFFMVNSDTLMHNYQELWMSRSDQQILSKLVKSAKTVENGQVGRLFENIVEQINKYFPLYDINQFRKKLDQSKDIFSKLPLEGNGTTSGKRETIQNILTGAGTGAKNGDLKNLGIKTPFGFLQVPSGIVLDDDTTLIYQSPTGMLNRIVRLSEL

SEQ ID NO: 513 - protein, 1352 aa, Lactobacillus ruminis
MNDNFDLMRVKGKKGIGVRLYNEGQSAAERRMHRTARRRYGRRKWRLRLLEDFFDEHMAEVDDTFFARLKDSNISPKDDKKYRKSLLFPKSKGVTYQDDGEFYKKYPTMYHLRYALMTEHRKFDLREIYLAFHHMVKYRGNFLYDTSVDSFEAKNLDIKGKFDEINDLLSSYTDFYVDNSNAALVESILLEKNTTRKDKSKKIAKLLHVEDKEKGKNKKAKDLATQISNAVLGLKCNFHLIFELQQKYSFDLCSEKTEENIAKLSEVLDENQKMLLMILKEVQDQVMLNAFVPSGMSLSEAMMQKYDDYGEQLKIYHELEHSVSDDSAAKLRGAYRDYNDNIIKRIDGDNKKDTFYKRVKNILTKISKEYVDQDVLESCGKLKKLIDENKLFIRQRTAANGVLPHQLHQIEMRKIIDNQKEYYPWLAEPNPNEKRRVYSKYKVEELIAFRIPYYVGPLVDPNNADKNKEARFSWMVRKKDGEITPWNFYDKVDWAESANNFIERMKSKDTYLLGEDVVPKESMLYQKYEVLNELNNLRINDSGLSDSFEDVKLKQAIYNDLFKKQKIVKITDLQNYLVQNHKYLVKPKISGLADENRFLSSLSTYSDLKTIFGDKVDDRTYFNDFEKMVEYSTVFEDGHDYNQKLDEYTWLTKEEKYKIGKKRYRGWGKLSKKLLTGLRDKNNHTIMDNLWETNRNFMQIQTADEFSKQIAEENERHLKGSVSDAINDMYTSPANKKAIRQVLRVVDDIQKAMGYAPSSISLEFAREDGPSVRTVSRANRMKSIYEKYASEVSEEVMKDLDGVIKDKKGLNDRLYLYFEQQGKDMYSGHPLDFDKVISGQEYDIDHILPQAVIKDDSLDNRVLTTKALNNDVKSKGVPCRMFNGMHSFWKNLYDKGFISRRKFNNLTTNPENIDKYKMKGFVNRQLVETRQIIKLVANVLNDKYQNDDVDIIEVRAELTHDVRKHFKFYKNRNVNDYHHAFDAYLTSFIGHYLFKKYPNLRPLFDYNDFMKVSDNVFKQLRGNNFLGEFLNKTGDIISTDGNFVLNKEEMINKLNKAYAFKKILVTKEVGQRTGAMFNETRYPAPNSRKAALKYRRMPKPDSLISVKDYKNTDIYGGYSGKNDAYMVIVDMGKQYMVVGVPVRYTEKLDKLRIKHSELYRDELRKVLSRDKTLLDSKGNVKRFDIVLDRVLYGQLIEDGNELFTLGSSKYKRNFRQLFLDKQCIEILDSSATPQPTDEELIWVYDQILDKVDKYFELYDINRQRETLRKGRAAFCSLPNISMKKDDVTKKKILNEILVALHANESESNCEKIGKKVFGRLQVPGGIKLSKEAKLIYQSPTGLFERVVYLKDL

SEQ ID NO: 514 - protein, 1339 aa, Lactobacillus salivarius
MERYHIGLDIGTSSIGWAVIGDDFKIKKKKGKNLIGTRLFNEGATAAERRGFRTQRRRLNRRKWRLKLLEEIFDPYMAEVDEYFFARLKSSNLSPKDSNKKYLGSLLFPDKSDSNFYDKYPTIYHLRRDLMEKDEKFDLREIYLAIHHIVKYRGNFLEKVPAKNYKNSGASIGFLLEEVNSLYKDIIGDESIAILNSEKFEDVEKIILDEETRNLDKQKSVGKLLVEDKKKKNIVTAFSKAIFGYKFNIEDLLLIENDEKNKLTFNDENIDDIFNELSHSLDDKQMDLLTKTREIYFKFKLNMIVPTGYTLSESMIEKYEMHKAHLKMYKEFINTLNTKDRKILKNAYSDYINTEKAKAANAQENFYKTVKKIIKDNNSDTAKKIIVLIDEGNFMPKQRTGENGVIPHQLHQIELDRIIENQAKYYPWLAEANPVEKNRKFAKYKLDELVTFRVPYYVGPLIDKTESNKNEKETKFAWMVRKAKGTITPWNFENLVDRTESANRFIKRMTSKDTYIIGEDVLPASSLLYEKFKVLNELNNIKVNEKKLDIEQKQDIYLNLFTTAKNVTKKSLATYLNCSADSISGLSDGEKFNSSLSSYIDLKAILGNIVDDCNKNEDLEKIIEYSTVFEDGNIYKEKLSEISWLTDEQIEKLSNIHFKGWGRLSKKLLTQITNENGERIIDALWNTSNNFMQIINDESIQAKLAEINGKYAGKSDLEDILSEAYTSPQNKKAIRQVMKVVEDIEKAMQCEPTSISIEFTRKKQKSRLTNTRYKKISDVYEKIADEVISEYELRKLQSELDSNANNMRDRYYLYFMQLGRDMYTGEKINIDELHQRYDIDHILPQSFIKDDSINNRVLTRKDVNNKEKSDKTAADLYAVEMSDFWRKLRKQGLITEQKYKNLLTKSDSIDKYAKKGFIKRQLVETSQVVKLVANILQDKYSDTKIIEVRAKLNSNLREEYKLIKNRAVNDYHHAIDGYLTTFIGQYLYKTYPKLRSYFVYNDFKKLDSNYLKHMKKFNFLWQLQDDKTIDIYDNVNNKFVLNVPEMKKYIQKIYNYKYMLVSKEVTTKNGAFYDQTKYNAKTVNLIPIKKNKPTNIYGGYKGKVSSYMMLVKIRKKKEVIYKFVGVPRLWTDELDRLKDTTERKILLNEIAKNSLSKTEQDFEVILDKVYYGQLIIDGNQKYTLGSSEYKYNAMQLHLSKHALEVLAKENVKDAEITDKDLVSVYEEILSVVNKYFELYDINKFRQKLNEGLEIFRKLPVYNVYESNKIKQVGKFEVLNRILMGLHANAMITDLKVLGIKTKLGQMQVNGGIKLSPDAKLIYQSPTGIFSRAVRVKDLG

SEQ ID NO: 515 - protein, 629 aa, Lactobacillus salivarius
MERYHIGLDIGTSSIGWAVTGDDFKIKRKKGKNLIGTRLFKEGNTAAERRGFRTQRRRLNRRKWRLKLLEEIFDPYMAEVDEYFFARLKDSNLSPKDSNKKYLGSLLFPDISDSNFYDKYPTIYHLRRDLMEKDEKFDLREIYLAIHHIVKYRGNFLENVPAKNYKNSGASIGFLLEEVNNLYKDIVGDENVTILNSEKFEDVEKIILDDGIRNLDKQKGVGKLLVEDKKNKNLVTAFSKAIFGYKFNIEDLLLVEGDEKSKLTFNDENIDDIFNELSHSLDDRRMDLLTKTREIYFKFKLNMIVPTGYTLSESMIEKYEIHKAHLKMYKEFINTLNSKDRKILKNAYTDYINNEKAKAANAQENFYKTVKKTIKDNDSDIVKKIIDLIDEGNFMPKQRTGENGVIPHQLHQIELDRIIENQAKYYPWLAEENPVEKNRKFAKYKLDELVTFRVPYYVGPLVDKTESNKNEKETKFAWMVRKSKGTITPWNFENLVDRTESANRFIKRMTSKDTYIIGEDVLPASSLLYEKFKVLNELNNIKVNEKKLDIEQKQNIYLKLFTTTKNVTKKNLATFLNCSIESISGLSDDKKFNSSLSSYIDLKVILGDIVDDYSKNEDLEKIIEYSTIF

SEQ ID NO: 516 - protein, 897 aa, Lactobacillus salivarius
  misc_feature (822)..(822): Xaa can be any naturally occurring amino acid
MLIESDEKNKLTFNDENIDDIFNELSHSLDDNQMDLLTKTREIYFKFKLNMIVPTGYTLSESMIEKYEMHKAHLKMYKEFINTLNAKDRKILKNAYSDYINNEKAKAANAQENFYKTIKKTIKDNNSDTAKKIIGLIDEGNFMPKQRTGENGVIPHQLHQIELDRIIENQAKYYPWLAEENPVEKNRKFAKYKLDELVTFRVPYYVGPLVDKTESNKNEKETKFAWMVRKAKGTITPWNFENLVDRTESANRFIKRMTSKDTYIIGEDVLPASSLLYEKFKVLNELNNIKVNKKKLDVEQKQHVYLDLFTTRKNVTKDNLATSLNCDVESITGLSDNEKFNSSLSSYIDLKAILGNAVDDCNKNKDLEKIIEYSTIFEDGNIYKEKLSEISWLTDEQIEKLSNIHFKGWGRLSKKLLTQITNENGERIIDALWNTSNNFIQIISDESIQAKLAEINGEYADKSNLEDILDEAYTSPQNKKAIRQVMKVVEDIEKAMKCKPTSIAIEFTRRKGKSKLTNTRYKKISETYEKITDELISEYELGKLQSKLDSKANNMRDIYYLYFMQLGRDMYTGEKINIDELHQYYDIDHIFPRSFIKDNSLNNRVLTRKEINNNEKADRTAADLYAVKMGDFWRKLRKQGLITEKKYKNLLTRTDSIDKYTKQSFIKRQLVETSQVVKMAANILQDKYSNTKIIEVRARLNSDLRKEYELIKNREVNDYHHAIDGYLTIFIGQYLYKTYPKLRSYFVYDDFKKLDSNYLKHMDKFNFIWKLEDKKAEDVYDNVNNEFILNVPKMKDYIQKIYNYKYMLISKEVTTESGAFYXZTKYNAKTINLIPIKKDKPTNIYGGYKGKVSSYMMLVKIQKKKEVIYKFVGVPRLWTDELDRLIDTDEKKALLKK

SEQ ID NO: 517 - protein, 1419 aa, Lactobacillus sp.
MAKPQNYTIGLDIGTNSVGWTVTDDQNNILRIKSKKAIGARLFEEGKVAAERRSFRTTRRRLSRRKWRIKLLEELFDEEISKVDPNFFARSHESWISPKDKRERYSAIVFPTPEEDKKFHNEYPTIYHLRDRLMKDDQKHDIREIYVAIHHIMKYRGNFLHDESIETYRSGMSSLGGGDERTILNTKILDDLNDAFADNLATQGISVNSASADQINEIVTSGHLNVDSQKAIAKLLLPTTLSSDDKKQDKKIKKLATDAAKNVASAWLGYKANFAAILNIQEVDKDKKKIYSFALQGADEEDKVETLESVLSQDQIEIVDRIIRIRHAIVLGEIIPVGMTLSEAMIEKYDQHAKDLKNLKTVIRNLKDRKNAVKLQAIYDLYVNNRHADTAKAMKLAGVKKRTELLEPEEFNKSIEKLLDDSPVSAEIKKRIAEKDFLPLQRSNSNGVIPNQLHQIELDEIIKKQSKYYPFLGETNEHASADVARKAPTKLDQLLTFRVPYYVGPLITKEEQEEQDGHSFAWMIRKNPKDHEKITPWNFDEKVDRMASATQFIKRMTTKDTYLLGEDVLPSSSLKYQLFTVLNELNNLRINHKKLTREEKEQVIEDLFKKYKTVKADKFKNYWQKGHAGLDVKIQGMADPEKFNSTMSTYIDLQKIFGDQLDDAQRQNDFEKIIEYSTIFEDRKILGEKLRADFVWLSEDQIKRLCRLRLQGWGRLSLKLLTRLTDADGQNVLERLLNSNDNFMQIVKDPVIKAKIEQKNQKLLRADWSENATESILDEAYTSPQNKKAIRQVMRVVHDIVKACDGNLPAKFAIEFARSQDDDPKRTVARADRLQKIYAQISDEVVSQGVKDQLSGMKSLKDRYYLYFMQGGRDAYTGKPLNIDRLSDYDIDHIMPQSFIKDDSLDNRVLVTRAVNNQKSDNVPVLLYGNHLVADLGITIREMWDRWQKSGMISKRKLANLLTDPATLSEYRAEGFINRQLVETSQVIKLTATILQSEFPDSKIIEVPAKYNSILRKQFDLYKSREVNDYHHAIDAYLSTIVGNYLYQVYPNLRRLFVYGEFKKFSHGEEESSHQAVRRVKSMNFLDDLLRGKHGDDIYCRVTGEVIFSRKDIISKLKQAYSFKQMLVTQEVFTKKSALFDQTVYPSPARDSKTRSGLIPRKQGMDTEIYGGYSGNKDAYFVLAQVVKSKGHTLQVVGVPIRALRALANCSNYSEQLLKIVKAQVLFNKKTGKAKKGISDVRILLDKIPYRQPVLDGSAFYMLGSSTYKYNLKQISLSQQSMKYILDYIDDPNFNKHEMTKIDQQNEKECLLSVYDEILDKMDKYLSLYDINGFRKKLHVGRDKFIKLEVEKQAEAIKNVLRGFHANSDMTKLSDLGLSTSLGFMQASDGIKLSDNAVFIYQSPTGLFERRVKVSDLLK

SEQ ID NO: 518 - protein, 1289 aa, Lactobacillus versmoldensis
MRRRYRRRRNRLNWLDELFADELAKIDPSFLLRMKNSWVSKKESTRKRDPYNLFIDEKYNDVDYFNQYPTIFHLRKELITEDKKVDIRLIYLAIHNIIKYRGNFTLENQNFDISQLSSNFSQQISDFFALFSDFGVIMPEDFDPDKISDILLNPNLSPSGKVSEAIATISPKTNVKAKIKIILLLLVGNNGDLKKLFDLETTEKIAVKLSSRHIDSELPIILSELNEQQENIITIANSIFGSIILKDFLGDETSISAAKVISFEDHKQDLQKLKTMWRETSNKEAVKAGKKAYEDYIGHEDSETFYKKIKKFLEKAQPVDLANKALAEIELENYLPKQRNRNNTVIPYQLNENELIAILDHQEKYYPFLKENRDKILSLLTFRIPYYVGPLQDSNNNRFSWMTRKASGAIRPWNFSEKVNVEQSSNDFIKRMRSTDTYLIGEPVLPKKSLIYQCYEVLSELNNTRVKDGSSNPKRLDVTIKQRIYNEIFKNQKSVSVKVLQNWLIKESYFKSPEISGLADKKKYLSSLSTYIDFKKIFGQRFVDDPVNSPQLEELAEWLTLFEDKKILLIKLQNSKYSYDQATINKLSTMRYQGTGKLSKKLLVDLKTTKKSIGKSGAESLSILDLMWSTKDNFMQIIHDADYTFEQQIKEFNYDTEDELTPLEKVANLHGSPALKRGLNQSIKVVADIVKFMGHDPEKIFIEFTRSDDFSKLTISRYRRIKKQYLEIAKAIKKIPAEFKDIKEYQTQLEENKGKLASERLMLYFLQCGHSLYSNKPIDLNMINSSKYHVDHILPQSYIKDDSLENKALVLASENENKIDNMLISHDIIATNLPRWQALKDQNLMGSKKFADLTRTTVTENQKKGFIQRQLVQTSQIVKNITLILNDLYKNTSCIETRATLSSEFRKAFSNFDETTYHYQFPEFVKNRDVNDFHHAQDAFLACVIGEYQLKKYPKDNLRLVYDQYSKFLDSLKKDTRKKNGRMPRYTQNGFIIGSMFNGKTYVDDNGEIIWDQKIKESIRKTFNYHQFNVVRQTIEQHGKLFNDTIQPHSDRYKLIPLKTNRDPAIYGGYNNDNNAYSVVLDVDGKKKINGIPIRIANQLKSDELDLSSWLENNIKHKKPMTILIDKVPKYQRIINEETGDLLITSANEVINNVQLFLPSMYTALISLLDSTKTEMYSKLLSNYEANILIDIYDYLLTKLKNNYPLYRKEWAKLAEHRDDFIESDLVTQASTLQQLIKFMHADPSNVNLKFGNFKGNRFGRKNGNIKLSKTDFIYESPTGLFKSIKHID

SEQ ID NO: 519 - protein, 1372 aa, Legionella pneumophila
MESSQILSPIGIDLGGKFTGVCLSHLEAFAELPNHANTKYSVILIDHNNFQLSQAQRRATRHRVRNKKRNQFVKRVALQLFQHILSRDLNAKEETALCHYLNNRGYTYVDTDLDEYIKDETTINLLKELLPSESEHNFIDWFLQKMQSSEFRKILVSKVEEKKDDKELKNAVKNIKNFITGFEKNSVEGHRHRKVYFENIKSDITKDNQLDSIKKKIPSVCLSNLLGHLSNLQWKNLHRYLAKNPKQFDEQTFGNEFLRMLKNFRHLKGSQESLAVRNLIQQLEQSQDYISILEKTPPEITIPPYEARTNTGMEKDQSLLLNPEKLNNLYPNWRNLIPGIIDAHPFLEKDLEHTKLRDRKRIISPSKQDEKRDSYILQRYLDLNKKIDKFKIKKQLSFLGQGKQLPANLIETQKEMETHFNSSLVSVLIQIASAYNKEREDAAQGIWFDNAFSLCELSNINPPRKQKILPLLVGAILSEDFINNKDKWAKFKNFWNTHKIGRTSLKSKCKEIEEARKNSGNAFKIDYEEALNHPEHSNNKALIKIIQTIPDIIQAIQSHLGHNDSQALIYHNPFSLSQLYTILETKRDGFHKNCVAVTCENYWRSQKTEIDPEISYASRLPADSVRPFDGVLARMMQRLAYEIAMAKWEQIKHIPDNSSLLIPIYLEQNRFEFEESFKKIKGGSSDKTLEQAIEKQNIQWEEKFQRIINASMNICPYKGASIGGQGEIDHIYPRSLSKKHFGVIFNSEANLIYCSSQGNREKKEEHYLLEHLSPLYLKHQFGTDNVSDIKNFISQNVANIKKYISFHLLTPEQQKAARHALFLDYDDEAFKTITKFLMSQQKARVNGTQKFLGKQIMEFLSTLADSKQLQLEFSIKQITAEEVHDHRELLSKQEPKLVKSRQQSFPSHAIDATLTMSIGLKEFPQFSQELDNSWFINHLMPDEVHLNPVRSKEKYNKPNISSTPLFKDSLYAERFIPVWVKGETFAIGFSEKDLFEIKPSNKEKLFTLLKTYSTKNPGESLQELQAKSKAKWLYFPINKTLALEFLHHYFHKEIVTPDDTTVCHFINSLRYYTKKESITVKILKEPMPVLSVKFESSKKNVLGSFKHTIALPATKDWERLFNHPNFLALKANPAPNPKEFNEFIRKYFLSDNNPNSDIPNNGHNIKPQKHKAVRKVFSLPVIPGNAGTMMRIRRKDNKGQPLYQLQTIDDTPSMGIQINEDRLVKQEVLMDAYKTRNLSTIDGINNSEGQAYATFDNWLTLPVSTFKPEIIKLEMKPHSKTRRYIRITQSLADFIKTIDEALMIKPSDSIDDPLNMPNEIVCKNKLFGNELKPRDGKMKIVSTGKIVTYEFESDSTPQWIQTLYVTQLKKQP

SEQ ID NO: 520 - protein, 907 aa, Leptospira inadai
MAKSIEEIRSIQNEFVVEYSILLKKIKKGEIDKKNDVYKVYQNTIKSSERLEQVLKERLGFQNVSKSYFNNPYSIAQLYNLISVDRSGFSKVCRSCQEENHWRSTLIDTDRGPQAQASKQVSDTGRPFDGQLAMLLDRIAFEIVKLKRIEIERLLSNKNSSKIEVVEIPLLIEENSFNFRYELAELKKLSKKKKDQLKKSVEEFDTKLNSKQERIKAASRELCPYTGKKISKGEIDHILPRSWTQKQFGTALNAEANLIYASREGNQSKGNREYGLNDLDEKYLNIIFGTKEVDSIQRNISDTIDRLDIERGTTRIVFDRLAPNERDCLRHALFIKSLRPKVFELLSGQLKARVNGTQLYLAKRIRSLLLKNQDFITKSLIIKVPSFSFYEPRTVDLPYMRKELAEKFPNLGKQNPQPTGSHIIDAAMVMAYAVETDSGNLSFGSKDKSEGFDSESLSRFLPSNIQFLSIKSKDKTDSKYPYKKPLFKDGVFGERFLPILIAEKGLRVGYTLENSLEVNSENPEEFFNVLKPYLLFKRKPIESNYQTLVAFAQKDKRGYIVLPVNKPKALESISQRKSDPHTSILKNILYTVSRESIPSLIFDKNTLIPEIKSNKVNWGDKLEKKFRIKIEIKLYGKKIADGFIRYPGKTEWEKLLLTEPLKGLVKNKTLTPKWFDSLENLAGLDDHFKDTSNPEAKHKRKSNHYALPVPKGPSGGFRIRRNSFDGYKVYQLYSVDGNSFHAFKIENGWTGKTLLLDIYQNSGNLHSLDYDYENTDISQTALFSKFYKIEFSKEETQKINSKGIKSLYVAPGSSSRQYIRVIFDKQTFSKFIKFQSKFWEFDLITPLPKDKAKDLIESILKIFPEDLRPKKPRNDIHIQNISHDSVQVEYIADGKTQGFGQYFINQN

SEQ ID NO: 521 - protein, 418 aa, Leptospira inadai
MILKSPIAIDLGAKNTGIVYTTYQPNALPTEIHGATIISDNLKLSQVDRRAKRHQRRNYTRMKLARRLVYLIIRYHYRIPEQDLTPEVKTSLQSLLTRRGYTFQSIETEGNELGQAPWGEIEDYFPNVQDYEKSLPIQTVLYHFFSSENLELNKLVPSKEPETKEDKNILKYIREQKEAFESEQNNGARHRLKYFEEIKEDFPRKIKLMECLQKNKIEEKKFLNLIQNISNLQIKPLRAYFNDKDMKEKEIWEPRRLHTYIARWIRSWHIDPKNSSKRLIRQKLLSQLENGKLKIIRDTSIYSPSKDIISFLEEIDPKDTIPPYEDQNNRHPPRCQNLWLDGKILDRYFPGWEQSLWKLIRNEKNNPFEQLITKDFRTDDTISEGKSLSEQIQIYERSHSNIKLDVRAVILQRFLDRS

SEQ ID NO: 522 - protein, 125 aa, Leptospira inadai
MSAYDRSANLDPWSLRLQGKAKKEIKTTESLSKTDLQKASDAYEKIKEILSESDTDQFIKLANRYYLEVADIKKGMWLPTAPERKHKEIPKSIAHEENQDISLFHKCNTKTGSKKRISQVSLEMF

SEQ ID NO: 523 - protein, 1355 aa, Leuconostoc gelidum
MTYSIGLDIGTGSVGWAVIGDDYRLKRAKGKNLIGVRLFDSATTAAERRGYRTTRRRLSRRHWRLRLLNDIFASDLAEQDENFLPRLKYSWVNPDDEQNPQLNSDVANGALFGSSETDKAFHKNYPTIYHLRHELMTDTAKHDLREVYLAIHHIVKYRGNFLNTADKINAENSFNVDLFIAALDEYNEFLETPITSIKDAQLFSDKLTDINARNKSVRVENAMSETYDDKSKIFKAILTALVGNTANFQTIFDLSDLEKDEAKNFKFKLDLEDVETKLDVVRAKLSDEQNAFLEAVLIAYDGITLKMILGDYKSISQSMIESYKSHQRDWKYIKNNVRLNEQKIEPDKNSVKFFKLDPKKLIYPSNLAYLQVISSNEDEHRKGLDYFKTAIQDADILQRIENDTFLPRQRTKRNGVLPYQLHLAELEQIIKKQSKYYPFLANIYTQDNKTENKLIGLLKFRVPYYVGPLVEAEKVTGDGKNHWLIKKELQENTPITPFNFDDVVDKDKSGEQFIKRITGTDSYLIGEPTLPENSLLYQKYNVLQELNNVRNERHQRLPIKVKQDIFEHVFKIDKNVNAKKVMAYLKLNGYGDFQIAGLSDTRTGKFNSNLSSYNYFVDLLGREKTEKIREDRLEEIIEIQTVFEDKILVAKRLSNLDFLTPQEKSKLSAKHYTGWGRLSQKLLTTQFIKTALSEAGDIIPQSHSIIDLLYYTDKNLMEILNDKTFNVRNWLTEQNKGTESGNSLYDQIDALAGPKDIKRGITQVFSIIDDIKKAMGSNPETVYLEFARETQTSRLTNSRLNRVQEIYNSPELKTEFAYLAKKLEAETKESIHDDRLYLYYLQEGRDMYTGKEIPFDQISSNYDIDHIIPQAFTKDDSLDNRVLVNRATNARKSNSPTFTNDIIDNRKSWWQSLVKRGLMSKEKFERLTDKRKTFSENQTNHFIARQLVETRQIIKNVADLIKNNYDGTQAVAIRASLTGEMRRYLDWPKNRDMNDYHHAHDALMMATVGKYVDRRGFFDNGSVSDGAGNAYNLYTKDWLVAARVGTRNDSQRVNPYGFIVGSMNSKAVRQQVNKETGEIVWGNENLDYLRHVLSYKKILVTRRLSGSSGRLYAETLFSPNPKAKLIAQKANRSVALYGGFTKAESAYTALVEFNKKGDRSYKLIKVPMAIANRVNDKQITVTAYIASLNLRDFSRVVLEHLPLGTLIRESDGSEFYAASSEYKHNAKELWAPKEILRSSKKLDKATADNLIDIFDFLTNDKTISNFKFYEKDLLHLKNVRDKFVEASDEIKIKVLSDVIYELHNDAGWRDPFKHIQEKPAWTMLQVKGGIKLSEKAAIVYQSPTGLFETITIVGE

SEQ ID NO: 524 - protein, 883 aa, Leuconostoc pseudomesenteroides
MIGVRLFEGADTAAERRGYRTTRRRLSRRRWRLRLLNDIFASELSKIDENFLPRLKYSWVNKNDTDNVHFGVGVFDNSEQEKAFYQDYPTIYHLRQKLMTDNRQHDLREVYLAIHHIVKYRGHFLNSGEISANSSFDAQKFLELLREFDNTFYPDAVKFLNLDQLDLPDKISSEISDSKISKSERVDRVLQHVQLANSGAKKILKAILNAVVGNSVDSVAMFSLSDLDKEEKKKINHPVTDSKPFKYSDKEVEAKLDELSNLLQDEQKIEFLSLLKLSFDGLTLKMLLGNAKSVSEAMVERYKVHKDDLKFIKENILNSFSKDKKKEFDKYYEAHLAEKDVDNVDKYFKKIIDDSIISKDKKIELLQKIDDHDFLPSQRSKINGAIPHQLHRNELDKIISQQSKYYPFLADSYTQNGKTETKLAGLVNFRVPYYVGPLVSKENADRNNPDGGQNHWVEFKENTSLSNLTPWNFNEIVDKDKSAAKFIERLTGMDTYLIGEPTLPQNSLLYQKYNVLQELNNIRVDNHKLDVKIKQDVFEHLFKTQNSVSAKDVKNYLIANGYAAPSIQITGLSDTNEKTFNSKLSSYNYLVDKLGRTFVESVKSDVLEKIIELQTVFEDKTVLLRQLSMISELTLAQANQLAEKHWTGWGRLSRKLLSSKVVDVNKITNSTFYPATSRQTIIDTLYHTQLNLMEIINNAEDLYGVRQWISEQNKSDSSDTNDVYDQIQELAGDKKIKRGITQSFRILDDIVKAMGGEPERVYLEFARENQQSGVSFSRKNLLSKLYENDSLKQTFKELKSQLESETKENLQNDRLYLYYLQQGRDMYSNDELNIDQLSSYDIDHIIPQAYTKDNSFDNRVLVSSKANRLKRMLLWYPVKLSKK

SEQ ID NO: 525 - protein, 468 aa, Leuconostoc pseudomesenteroides
MKDQGFISKRKFENLTRRGDFSEQQKERFIARALVETRQIIVNVSSLIDSHFNHTKAVAVKSNMTTDMRHYTKVPKNRDINDYHHAHDALFVATVGQYIENKGFMKAGKLSDSVGNEYNRYTKKWIETARKNTNYGRVNPFGFVVGSMQTATRGKLDYETGELKVVKNNYWSKDDLDYLLKVVSYKKILVTTKLQDNKGAMYDANLISAKGSGKKKAQLQISKSKNIDLYGGFNKLQNEYSVLILNHDEYRWLSIPMYARNSSEQYLHDKYPDAKVILNHILVGQPILLSNSSDPQKSKFASLRIATGGDYHNNFEFVPSVDVKKILDNIYLNHSVTDDEYKKVFESLLATLHDKFVFGIHQVMYNKIFDNKYLFDKMPDEAKRNVINSLLKFMNISKNQLGAVGKIGGKVNGVLYGFKTETEKGTSAGQLISNGKMQPHDIFIFQSPTGIFERRVTVAELANVIKDE

SEQ ID NO: 526 - protein, 1103 aa, Listeria innocua
LKLYPGEKSTGMFAQFISLIVGSKGNFQKPFDLIEKSDIECAKDSYEEDLESLLALIGDEYAELFVAAKNAYSAVVLSSIITVAETETNAKLSASMIERFDTHEEDLGELKAFIKLHLPKHYEEIFSNTEKHGYAGYIDGKTKQADFYKYMKTTLENIEGADYFIAKIEKENFLRKQRTFDNGAIPHQLHLEELEAILHQQAKYYPFLKENYDKIKSLVTFRIPYFVGPLANGQSEFAWLTRKADGEIRPWNIEEKVDFGKSAVDFIEKMTNKDTYLPKENVLPKHSLCYQKYLVYNELTKVRYINDQGKTSYFSGQEKEQIFNDLFKQKRKVKKKDLELFLRNMSHVESPTIEGLEDSFNSSYSTYHDLLKVGIKQEILDNPVNTEMLENIVKILTVFEDKRMIKEQLQQFSDVLDGVVLKKLERRHYTGWGRLSAKLLMGIRDKQSHLTILDYLMNDDGLNRNLMQLINDSNLSFKSIIEKEQVTTADKDIQSIVADLAGSPAIKKGILQSLKIVDELVSVMGYPPQTIVVEMARENQTTGKGKNNSRPRYKSLEKAIKEFGSQILKEHPTDNQELKNNRLYLYYLQNGKDMYTGQDLDIHNLSNYDIDHIVPQSFITDNSIDNLVLTSSAGNREKGNDVPPLEIVQKRKVFWEKLYQGNLMSKRKFDYLTKAERGGLTEADKARFIHRQLVETRQITKNVANILHQRFNYGKDDHGNTMKQVRIVTLKSALVSQFRKQFQLYKVRGVNDYHHAHDAYLNGVVANTLLKVYPQLEPEFVYGDYHQFDWFKANKATAKKQFYTNIMLFFAQKDRIIDENGEILWDKKYLDTVKKVMSYRQMNIVKKTEIQKGEFSKATIKPKGNSSKLIPRKTNWDPMKYGGLDSPNMAYAVVIEYAKGKNKLVFEKKIIRVTIMERKAFEKDEKAFLEEQGYRQPKVLAKLPKYTLYECEEGRRRMLASANEAQKGNQQVLPNHLVTLLHHAANCEVSDGKSLDYIESNREMFAELLAHVSEFAKRYTLAEANLNKINQLFEQNKEGDIKAIAQSFVDLMAFNAMGAPASFKFFETTIERKRYNNLKELLNSTIIYQSITGLYESRKRLDD

SEQ ID NO: 527 - protein, 1337 aa, Listeria innocua
MKNMKKPYTIGLDIGTNSVGWAVLTDQYDLVKRKMKIAGDSEKKQIKKNFWGVRLFDEGQTAADRRMARTARRRIERRRNRISYLQGIFAEEMSKTDANFFCRLSDSFYVDNEKRNSRHPFFATIEEEVEYHKNYPTIYHLREELVNSSEKADLRLVYLALAHIIKYRGNFLIEGALDTQNTSVDGIYKQFIQTYNQVFASGIEDGSLKKLEDNKDVAKILVEKVTRKEKLERILKLYPGEKSAGMFAQFISLIVGSKGNFQKPFDLIEKSDIECAKDSYEEDLESLLALIGDEYAELFVAAKNAYSAVVLSSIITVAETETNAKLSASMIERFDTHEEDLGELKAFIKLHLPKHYEEIFSNTEKHGYAGYIDGKTKQADFYKYMKMTLENIEGADYFIAKIEKENFLRKQRTFDNGAIPHQLHLEELEAILHQQAKYYPFLKENYDKIKSLVTFRIPYFVGPLANGQSEFAWLTRKADGEIRPWNIEEKVDFGKSAVDFIEKMTNKDTYLPKENVLPKHSLCYQKYLVYNELTKVRYINDQGKTSYFSGQEKEQIFNDLFKQKRKVKKKDLELFLRNMSHVESPTIEGLEDSFNSSYSTYHDLLKVGIKQEILDNPVNTEMLENIVKILTVFEDKRMIKEQLQQFSDVLDGVVLKKLERRHYTGWGRLSAKLLMGIRDKQSHLTILDYLMNDDGLNRNLMQLINDSNLSFKSIIEKEQVTTADKDIQSIVADLAGSPAIKKGILQSLKIVDELVSVMGYPPQTIVVEMARENQTTGKGKNNSRPRYKSLEKAIKEFGSQILKEHPTDNQELRNNRLYLYYLQNGKDMYTGQDLDIHNLSNYDIDHIVPQSFITDNSIDNLVLTSSAGNREKGDDVPPLEIVRKRKVFWEKLYQGNLMSKRKFDYLTKAERGGLTEADKARFIHRQLVETRQITKNVANILHQRFNYEKDDHGNTMKQVRIVTLKSALVSQFRKQFQLYKVRDVNDYHHAHDAYLNGVVANTLLKVYPQLEPEFVYGDYHQFDWFKANKATAKKQFYTNIMLFFAQKDRIIDENGEILWDKKYLDTVKKVMSYRQMNIVKKTEIQKGEFSKATIKPKGNSSKLISRKTNWDPMKYGGLDSPNMAYAVVIEYAKGKNKLVFEKKIIRVTIMERKAFEKDEKAFLEEQGYRQPKVLAKLPKYTLYECEEGRRRMLASANEAQKGNQQVLPNHLVTLLHHVANCEVSDGKSLDYIESNREMFAELLAHVSEFAKRYTLAEANLNKINQLFEQNKEGDIKAIAQSFVDLMAFNAMGAPASFKFFETTIERKRYNNLKELLNSTIIYQSITGLYESRKRLDD

SEQ ID NO: 528 - protein, 953 aa, Listeria ivanovii
MKKMLANIDGADYFIDQIEEENFLRKQRTFDNGTIPHQLHLEELEAILHQQAKYYPFLRKDYEKIRSLVTFRIPYFIGPLANGQSDFAWLTRKADGEIRPWNIEEKVDFGKSAIDFIEKMTNKDTYLPKENVLPKHSLCYQKYMVYNELTKIRYIDDQGKTHHFSGQEKQQIFNGLFKQQRKVKKKDLERFLYTINHIESPTIEGVEDAFNSSFATYHDLQKGGVTQEILDNPLNADMLEEIVKILTVFEDKRMIKEQLQSFSDVLDGTILKKLERRHYTGWGRLSAKLLTGIRDKHSHLTILDYLMNDDGLNRNLMQLINDSNLSFKSIIEKEQVSTADKGIQSIVAELAGSPAIKKGILQSLKIVDELVGIMGYPPQTIVVEMARENQTTGKGKNNSKPRFISLEKAIKEFGSQILKEHPTDNQCLKNDRLYLYYLQNGKDMYTGKELDIHNLSNYDIDHIIPQSFITDNSIDNRVLVSSTANREKGDNVPLLEVVRKRKAFWEKLYQAKLMSKRKFDYLTKAERGGLTEADKANFIQRQLVETRQITKNVANILYQRFNCKQDENGNEVEQVRIVTLKSTLVSQFRKQFQLYKVREVNDYHHAHDAYLNGVVANTLLKVYPQLEPEFVYGDYHQFDWFKANKATAKKQFYTNIMRFFAKENQIIDKNGEILWDNRYLDTIKKVLSYRQMNIVKKTEIQKGEFSNATVNPKGNSSKLISRKADWNPIKYGGFDGSNMAYSIVIEYEKRKKKTVIKKELIQINIMERVAFEKDQKAFLEEKGYYSPKVLTKIPKYTLYECENGRRRMLGSANEAQKGNQMVLPNHLMTLLYHAKNCEANDGESLAYIEMHREMFAELLAYISEFAKRYTLANDRLEKINMFFEQNKKGDIKVIAKSFDKLKVFNAFGAPRDFEFFETTIKRKRYYNIKELLNATIIYQSITGLYEARKRLED

SEQ ID NO: 529 - protein, 232 aa, Listeria ivanovii
MMSKLILGLDIGISSVGWGVLDESTNEVVDAGVRLFEEATRNGNEDRRGFRSARRLKRRRQHRLERAKGLIENNGFSCTDINKFNPYQARYNAIFGEVTKDELAAALFHLVKRRGTTIDAPEEEVKDVENELSTKMQLEKNAKKLATKYDYICEIQLEKLKENKVVRDHENRFRTEDYVKEARAILENQQEYYPEVTNEFIESYMALIETRRMYYDGPGSEKSPTPYGQYFI

SEQ ID NO: 530 - protein, 300 aa, Listeria monocytogenes
DDGLNRNLMQLINDSNLSFKSIIEKEQVSTTDKDLQSIVADLAGSPAIKKGILQSLKIVDELVSIMGYPPQTIVVEMARENQTTVKGKNNSRPRYKSLEKAIKEFGSQILKEHPTDNQELRNNRLYLYYLQNGKDMYTGQELDIHNLSNYDIDHIVPQSFITDNSIDNLVLTSSAGNREKGDDVPPLEIVRKRKVFWEKLFQGNLMSKRKFDYLTKAERGGLTEADKATFIHRQLVETRQITKNVANILHQRFNNETDNHGNNMEQVRIVMLKSALVSQFRKQFQLYKVREVNDYHHAHD

SEQ ID NO: 531 - protein, 782 aa, Listeria monocytogenes
  misc_feature (722)..(722): Xaa can be any naturally occurring amino acid
IFNDLFKQKRKVKKKDLELFLRNINQIESPTIEGLEDSFNASYATYHDLLKVGMKQEILDNPLNTEMLEDIVKILTVFEDKRMIKEQLQQFSDVLDGVVLKKLERRHYTGWGRLSAKLLVGIRDKQSHLTILEYLMNDDGLNRNLMQLINDSNLSFKSIIEKEQVSTTDKDLQSIVADLAGSPAIKKGILQSLKIVDELVSIMGYPPQTIVVEMARENQTTVKGKNNSRPRYKSLEKAIKEFGSQILKEHPTDNQELKNNRLYLYYLQNGKDIYTGQELDIHNLSNYDIDHIVPQSFITDNSIDNLVLTSSAGNREKGDDVPPLEIVRKRKVFWEKLYQGNLMSKRKFDYLTKAERGGLTEADKARFIHRQLVETRQITKNVANILHQRFNNETDNHGNTMEQVRIVTLKSALVSQFRKQFQLYKVREVNDYHHAHDAYLNGVVANTLLKVYPQLEPEFVYGEYHQFDWFKANKATAKKQFYTNIMLFFAQKERIIDENGEILWDKKYLETIKKVLDYRQMNIVKKTEIQKGEFSKATIKPKGNSSKLIPRKENWDPMKYGGLDSPNMAYAVIIEHAKGKKKIVIEKKLIQINIMERKMFEKDEEAFLEEKGYRHPKVLTKLPKYTLYECEKGRRRMLASANEAQKGNQLVLSNHLVSLLYHAKNCEASDGKSLKYTEAHRETFSELLAQVSEFATRYTLADANLSKINNLFEQNKEGDIKXIAQSFVDLMVFNAMGAPASFKFFEATIDRKRYTNLKELLSSTIIYQSITGLYESRKRLDD

SEQ ID NO: 532 - protein, 1334 aa, Listeria monocytogenes; identical to SEQ ID NO: 114

SEQ ID NO: 533 - protein, 1334 aa, Listeria monocytogenes
MKNPYTIGLDIGTNSVGWAVLTDQYDLVKRKMKVAGNSDKKQIKKNFWGVRLFDDGQTAVDRRMNRTARRRIERRRNRISYLQEIFAVEMANIDANFFCRLNDSFYVDSEKRNSRHPFFATIEEEVAYHKNYRTIYHLREELVNSSEKADLRLVYLALAHIIKYRGNFLIEGALDTKNTSVDEVYKQFIQTYNQVFMSNIEEGALAKVEENTEVASILAGKFTRREKFERILRLYPGEKSTGMFAQFISLIVGNKGNFQKVFNLVEKTDIECAKDSYEEDLEALLAIIGDEYAELFVAAKNTYNAVVLSSIITVTATETNAKLSASMIERFDAHEKELGELKAFIKLHLPKQYQEIFNNAEIDGYAGYIDGKTKQVDFYKYLKTTLENVEGADYFITKIEEENFLRKQRTFDNGVIPHQLHLEELEAILHQQAKYYPFLREGYDKIKSLVTFRIPYFVGPLANGQSEFAWLTRKDDGEIRPWNIEEKVDFGKSAVDFIEKMTNKDTYLPKENVLPKHSLCYQKYMVYNELTKIRYIDDQGKTNYFSGREKQQIFNDLFKQKRKVKKKDLELFLRNINHIESPTIEGLEDSFNASYATYHDLLKVGLKQEILDNPLNTEILEDIVKILTVFEDKRMIKEQLEQFSDVLDGVVLKKLERRHYTGWGRLSAKLLVGIRDKQSHLTILDYLMNDDGLNRNLMQLINDSNLSFKSIIEKEQVSTTDKDLQSIVADLAGSPAIKKGILQSLKIVDELVSIMGYPPQTIVVEMARENQTTGKGKNNSKPRYKSLEKAIKDFGSQILKEHPTDNQELKNNRLYLYYLQNGKDIYTGQELDIHNLSNYDIDHIVPQSFITDNSIDNLVLTSSAGNREKGGDVPPLEIVRKRKVFWEKLYQGNLMSKRKFDYLTKAERGGLTEADKARFIHRQLVETRQITKNVANILHQRFNKETDNHGNTMEQVRIVTLKSALVSQFRKQFQLYKVREVNDYHHAHDAYLNGVVANTLLKVYPQLEPEFVYGEYHQFDWFKANKATAKKQFYTNIMLFFAQKERIIDENGEILWDKKYLETIKKVLDYRQINIVKKTEIQKGEFSKATIKPKGNSSKLIPRKENWDPMKYGGLDSPNMAYAVIIEHAKGKKKIVIEKKLIQINIMERKMFEKDEEAFLEEKGYHQPKVLTKLPKYTLYECEKGRRRMLSSANEAQKGNQLVLSNHLVSLLYHAKNCEASDGKSLKYIEAHRETFSELLAQVSEFATKYTLADANLSKINNLFEQNKEGDIKAIAQSFVDLMAFNAMGAPASFKFFEATIDRKRYTNLKELLSSTIIYQSITGLYESRKRLDD

SEQ ID NO: 534 - protein, 1334 aa, Listeria monocytogenes
MKNPYTIGLDIGTNSVGWAVLTDQYDLVKRKMKVAGNSDKKQIKKNFWGVRLFDDGQTAVDRRMNRTARRRIERRRNRISYLQEIFAVEMANIDANFFCRLNDSFYVDSEKRNSRHPFFATIEEEVAYHKNYRTIYHLREELVNSSEKADLRLVYLALAHIIKYRGNFLIEGALDTKNTSVDEVYKQFIQTYNQVFMSNIEEGALAKVEENTEVASILAGKFTRREKFERILRLYPGEKSTGMFAQFISLIVGNKGNFQKVFNLVEKTDIECAKDSYEEDLEALLAIIGDEYAELFVAAKNTYNAVVLSSIITVTATETNAKLSASMIERFDAHEKELGELKAFIKLHLPKQYQEIFNNAEIDGYAGYIDGKTKQVDFYKYLKTTLENVEGADYFITKIEEENFLRKQRTFDNGVIPHQLHLEELEAILHQQAKYYPFLREGYDKIKSLVTFRIPYFVGPLANGQSEFAWLTRKDDGEIRPWNIEEKVDFGKSAVDFIEKMTNKDTYLPKENVLPKHSLCYQKYMVYNELTKIRYIDDQGKTNYFSGREKQQIFNDLFKQKRKVKKKDLELFLRNINHIESPTIEGLEDSFNASYATYHDLLKVGLKQEILDNPLNTEILEDIVKILTVFEDKRMIKEQLEQFSDVLDGVVLKKLERRHYTGWGRLSAKLLVGIRDKQSHLTILDYLMNDDGLNRNLMQLINDSNLSFKSIIEKEQVSTTDKDLQSIVADLAGSPAIKKGILQSLKIVDELVSIMGYPPQTIVVEMARENQTTGKGKNNSKPRYKSLEKAIKDFGSQILKEHPTDNQELKNNRLYLYYLQNGKDIYTGQELDIHNLSNYDIDHIVPQSFITDNSIDNLVLTSSAGNREKGGDVPPLEIVRKRKVFWEKLYQGNLMSKRKFDYLTKAERGGLTEADKARFIHRQLVETRQITKNVANILHQRFNKETDNHGNTMEQVRIVTLKSALVSQFRKQFQLYKVREVNDYHHAHDAYLNGVVANTLLKVYPQLEPEFVYGEYHQFDWFKANKATAKKQFYTNIMLFFAQKERIIDENGEILWDKKYLETIKKVLDYRQINIVKKTEIQKGEFSKATIKPKGNSSKLIPRKENWDPVKYGGLDSPNMAYAVIIEHAKGKKKIVIEKKLIQINIMERKMFEKDEEAFLEEKGYHQPKVLTKLPKYTLYECEKGRRRMLSSANEAQKGNQLVLSNHLVSLLYHAKNCEASDGKSLKYIEAHRETFSELLAQVSEFATKYTLADANLSKINNLFEQNKEGDIKAIAQSFVDLMAFNAMGAPASFKFFEATIDRKRYTNLKELLSSTIIYQSITGLYESRKRLDD

SEQ ID NO: 535 - protein, 1099 aa, Listeria monocytogenes
MKNPYTIGLDIGTNSVGWAVLTDQYDLVKRKMKVAGNSDKKQIKKNFWGVRLFDDGQTAVDRRMNRTARRRIERRRNRISYLQEIFAVEMANIDANFFCRLNDSFYVDSEKRNSRHPFFATIEEEVAYHKNYRTIYHLREELVNSSEKADLRLVYLALAHIIKYRGNFLIEGALDTKNTSVDEVYKQFIQTYNQVFMSNIEEGALAKVEENTEVASILAGKFTRREKFERILRLYPGEKSTGMFAQFISLIVGNKGNFQKVFNLVEKTDIECAKDSYEEDLEALLAIIGDEYAELFVAAKNTYNAVVLSSIITVTATETNAKLSASMIERFDAHEKELGELKAFIKLHLPKQYQEIFNNAEIDGYAGYIDGKTKQVDFYKYLKTTLENVEGADYFITKIEEENFLRKQRTFDNGVIPHQLHLEELEAILHQQAKYYPFLREGYDKIKSLVTFRIPYFVGPLANGQSEFAWLTRKDDGEIRPWNIEEKVDFGKSAVDFIEKMTNKDTYLPKENVLPKHSLCYQKYMVYNELTKIRYIDDQGKTNYFSGREKQQIFNDLFKQKRKVKKKDLELFLRNINHIESPTIEGLEDSFNASYATYHDLLKVGLKQEILDNPLNTEILEDIVKILTVFEDKRMIKEQLEQFSDVLDGVVLKKLERRHYTGWGRLSAKLLVGIRDKQSHLTILDYLMNDDGLNRNLMQLINDSNLSFKSIIEKEQVSTTDKDLQSIVADLAGSPAIKKGILQSLKIVDELVSIMGYPPQTIVVEMARENQTTGKGKNNSKPRYKSLEKAIKDFGSQILKEHPTDNQELKNNRLYLYYLQNGKDIYTGQELDIHNLSNYDIDHIVPQSFITDNSIDNLVLTSSAGNREKGGDVPPLEIVRKRKVFWEKLYQGNLMSKRKFDYLTKAERGGLTEADKARFIHRQLVETRQITKNVANILHQRFNKETDNHGNTMEQVRIVTLKSALVSQFRKQFQLYKVREVNDYHHAHDAYLNGVVANTLLKVYPQLEPEFVYGEYHQFDWFKANKATAKKQFYTNIMLFFAQKERIIDENGEILWDKKYLETIKKVLDYRQINIVKKTEIQKGEFSKATIKPKGIPAN

SEQ ID NO: 536 - protein, 1334 aa, Listeria monocytogenes
MKNPYTIGLDIGTNSVGWAVLTDQYDLVKRKMKVAGNSDKKQIKKNFWGVRLFDEGETAADRRMNRTARRRIERRRNRISYLQEIFALEMANIDANFFCRLNDSFYVDSEKRNSRHPFFATIEEEVAYHKNYRTIYHLREELVNSSEKADLRLVYLALAHIIKYRGNFLIEGALDTKNTSVDGVYKQFIQTYNQVFISNIEEGTLAKMEENTTVADILAGKFTRKEKLERILQLYPGEKSTGMFAQFISLIVGSKGNFQKVFDLVEKTDIECAKDSYEEDLEALLAIIGDEYAELFVAAKNTYNAVVLSSIITVTDTETNAKLSASMIERFDAHEKDLSELKAFIKLHLPKQYEEIFSNVAIDGYAGYIDGKTKQVDFYKYLKTLLENIEGADYFIAKIEEENFLRKQRTFDNGAIPHQLHLEELEAILHQQAKYYPFLKEAYDKIKSLVTFRIPYFVGPLANGQSDFAWLTRKADGEIRPWNIEEKVDFGKSAVDFIEKMTNKDTYLPKENVLPKHSLYYQKYMVYNELTKVRYIDDQGKTNYFSGQEKQQIFNDYFKQKRKVSKKDLEQFLRNMSHIESPTIEGLEDSFNSSYATYHDLLKVGIKQEVLENPLNTEMLEDIVKILTVFEDKRMIKEQLQQFSDVLDGAVLKKLERRHYTGWGRLSAKLLVGIRDKQSHLTILDYLMNDDGLNRNLMQLINDSNLSFKSIIEKEQVSTTDKDLQSIVADLAGSPAIKKGILQSLKIVDELVSIMGYPPQTIVVEMARENQTTVKGKNNSRPRYKSLEKAIKEFGSQILKEHPTDNQELRNNRLYLYYLQNGKDMYTGQELDIHNLSNYDIDHIVPQSFITDNSIDNLVLTSSAGNREKGDDVPPLEIVRKRKVFWEKLFQGNLMSKRKFDYLTKAERGGLTEADKATFIHRQLVETRQITKNVANILHQRFNNETDNHGNNMEQVRIVMLKSALVSQFRKQFQLYKVREVNDYHHAHDAYLNGVVANTLLKVYPQLEPEFVYGEYHQFDWFKANKATAKKQFYTNIMLFFAQKERIIDENGEILWDKKYLETIKKVLDYRQMNIVKKTEIQKGEFSKATIKPKGNSSKLIPRKENWDPMKYGGLDSPNMAYAVIIEHAKGKKKVVFEKKIIRITIMERKAFEKDEKSFLEKQGYRQPKVLTKLPKYTLYECENGRRRMLASANEAQKGNQQVLKGQLITLLHHAKNCEASDGKSLDYIESNREMFGELLAHVSEFAKRYTLADANLSKINQLFEQNKDNDIKVIAQSFVNLMAFNAMGAPASFKFFEATIERKRYTNLKELLSATIIYQSITGLYEARKRLDG

SEQ ID NO: 537 - protein, 1334 aa, Listeria monocytogenes
MKNPYTIGLDIGTNSVGWAVLTNQYDLVKRKMKVAGNSDKKQIKKNFWGVRLFDDGQTAVDRRMNRTARRRIERRRNRISYLQEIFAVEMANIDANFFCRLNDSFYVDSEKRNSRHPFFATIEEEVAYHKNYRTIYHLREELVNSSEKADLRLVYLALAHIIKYRGNFLIEGALDTKNTSVDGVYEQFIQTYNQVFMSNIEEGTLAKVEENIEVANILAGKFTRREKFERILQLYPGEKSTGMFAQFISLIVGSKGNFQKVFDLIEKTDIECAKDSYEEDLEALLAIIGDEYAELFVAAKNTYNAVVLSSIITVTATETNAKLSASMIERFDAHEKDLGELKAFIKLHLPKQYQEIFNNAAIDGYAGYIDGKTKQVDFYKYLKTILENIEGADYFIAKIEEENFLRKQRTFDNGAIPHQLHLEELEAIIHQQAKYYPFLREDYEKIKSLVTFRIPYFVGPLAKGQSEFAWLTRKADGEIRPWNIEEKVDFGKSAVDFIEKMTNKDTYLPKENVLPKHSLCYQKYMVYNELTKVRYIDDQGKTNYFSGQEKQQIFNDLFKQKRKVKKKDLELFLRNINHIESPTIEGLEDSFNASYATYHDLLKVGMKQEILDNPLNTEMLEDIVKILTVFEDKPMIKEQLQQFSDVLDGGVLKKLERRHYTGWGRLSAKLLVGIREKQSHLTILDYLMNDDGLNRNLMQLINDSNLSFKSIIEKEQVSTTDKDLQSIVADLAGSPAIKKGILQSLKIVDELVSIMGYPPQTIVVEMARENQTTGKGKNNSKPRYKSLEKAIKEFGSKILKEHPTDNQELKNNRLYLYYLQNGKDMYTGQELDIHNLSNYDIDHIVPQSFITDNSIDNLVLTSSAGNREKGGDVPPLEIVRKRKVFWEKLYQGNLMSKRKFDYLTKAERGGLTDADKARFIHRQLVETRQITKNVANILHQRFNNETDNHGNTMEQVRIVTLKSALVSQFRKQFQLYKVREVNDYHHAHDAYLNGVVANTLLKVYPQLEPEFVYGEYHQFDWFKANKATAKKQFYTNIMLFFGQKERIIDENGEILWDKKYLETIKKVLDYRQMNIVKKTEIQKGEFSKATIKPKGNSSKLIPRKENWDPMKYGGLDSPNMAYAVIIEHAKGKKKLIFEKKIIRITIMERKMFEKDEEAFLEEKGYRHPKVLTKLPKYTLYECEKGRRRMLASANEAQKGNQLVLSNHLVSLLYHAKNCEASDGKSLKYIEAHRETFSELLAQVSEFATRYTLADANLSKINNLFEQNKEGDIQAIAQSFVDLMAFNAMGAPASFKFFEATIDRKRYTNLKELLSSTIIYQSITGLYESRKRLDD

SEQ ID NO: 538 - protein, 874 aa, Listeria seeligeri; identical to SEQ ID NO: 180

SEQ ID NO: 539 - protein, 1087 aa, Listeriaceae bacterium
MKKLVLGLDIGVASVGWGIIDAENGDVVDTGVRLFSSRDASENESRRTSRQSRRLSRRKKHRRERIKQLLLAHDMDICDIVNENPYELRVKGLNEKLEVSEIYVALTHLAKRRGVSYLDDVVEEGGTIKSEHLNKNMEEIKSGKMPCEIQLERFEKYGQVRGMIEINQDTEESSFLVNIFRTSDYIKEAKTILATQQKFHKQITNEFIDEYIHIMASKRDYFIGPGNEKSRTDYGVYRTNGDTWDNLFEILIGKCSVFPEETRAARSSYVAQEFNLLNDLNNLKISNLESGKLSASQKHDIVEKVKNSKKFGTKDLLKYIASVCECKIEDIGGCRVDKNRKPIMHTFENYRKVHNALNEAGVDLRLSETDYDELMKIMTLNSETLEIKKQCKEKLPQLTEDYLNVCLVLNKKGAFSGWHALSLKAMKLMMPELYGTSKNQMQIIHTMQLGKAYLKPLNQQKYLNSEAILEEIYNPIAARSIRQTIKVTNAILKKYGHLDSVIIEMPRDYQTSEDERKMIEKMQKENEKEKKAALKRAREEYPFPDEAFRNHKELATKLRLWYQQDQFCVYSGRKISVVDLVRNPNQFEIDHIIPQSVSLDDSLNNKVLCFSEENQKKGQQTPFYYHKGKSGNWTYEQYKLFVEKLFDKKKISNKKRELLLFEEDINKWDVRRGFIARNLVDTRYASRVILNSYQQYFGNHEMGTKVKVVRGKFTSQLRKKWRIFKDRNESHSHHAIDALIVAATANLRLWKKNTLGVSDEGKVYDKETGEILPFEKLTESEYNEMMNKEPYLNFKTKLQNIETKVKYSYRVSKKVNRKISDATIYSTRERDGIDYIVGKIKNIYDVKTYKDQFLKRYKKNKEQFLMYQHDPQTFAILENIMATYQDAENPFLAYKKEYGVIRKYSKKGGGSPVTSLKFIDKVLGQKIDLTAKNQAALPKNKKVVLQSITPYRADVYYDEIDKRYHLIGVKYSLFSFSKQGYVINPIAYQKLLEKEQIHSEMKFCFSLYREDIIEFGEDPDSLTRYRFWSKNESGKNKIEVKPIEKPNFEKQTVLTITKKIKILNKYQTDVLGNSFKAQEEKDPRNIE

SEQ ID NO: 540 - protein, 1345 aa, Marinilabilia sp.
MKKILGLDLGTTSIGWAFIKEPEKDVVGSEIVDMGVRIVALSSDEENDFAKGNTISINADRTLKRGARRNLQRFKLRRDALLEIFKEMKLIPSNFKYAEDGPSSTFSTLKLRDKAAKEKIELDDLVKVLLQINKKRGYRSSRKAKSEEDDGSAIDSMGIAKELYENDLTPGQWVFEALQKGRKNVPDFYRSDLQEEFKKIVNYQSEFYPDVLNSSFVEDWMGKASTPTKQYFNKKGVHLAENKGKREERRLQEYNWRAVAVNSKIDLSEIALILSQINSQISNSSGYLGAISDRSKELYFKNQTVGQYLYQQIKINPHTRLKGQVFYRQDYLDEFEKIWSVQSGFHPQLNDALKKEIRDITIFFQRRLKSQKHLISNCEFEDYHKVVPKSHPIFQEFRIWQNLNNLTLIKKDNLNEKSELALEDKIALANELAFKREQSVKDALNILGLKSSEWEFNFTKIEGNRTNHAFFEAFAKIIEIEDGEPLDLGNLKADDILDQFSEAFLRIGIDPGLLQVNNDIEGPNYEKQPYIQFWHLLYSSEDDQKLKQNLIKKFGFKPDHAKILASISLQDDHASLSSRAIKKILPHLQSGLIYDKACTYAGYNHSSSFTKEENEKRELSSELDLLKKNSLRNPVVEKILNQMINVVNAILKDPNLGKPDEIRVEMARELKANAEQRKNMTSNIASATRDHEKYREILKKEFGLKRVTKNDLLRYKLWLETDGISLYTGKPIEASKLFSKEYDIEHIIPKTRLFDDSFSNKTICERQLNIDKANVTAFSFLQNKLSGDEFEQYQSRVKSLFGKLSKAKIQKLLMANDKIPEDFIARQLQETRYISKKAKEILFEITRRVSVTTGTITDKLREDWGLVEIMKELNWEKYDKLGLTYTIEGKHGERLNKIKDWSKRNDHRHHAMDALTVALTKPAYIQYLNNLNAKELNGKKSTEIFAIEQKYLKRENGKLCFIPPVENIRTEAKKHLSKVLISYKAKNKVVTINKNRTNKKAGFNEQIALTPRGQLHKETVYGKAFHYSTKFEKIGASFDVQKINAVAKKEEREALLKRLAENGDDPKKAFTGKNSLSKMPIYLDLKRNIKLPEKVKTVVLEQNYTIRKNIDPDLKLDKVIDVGVKRILENRLKEFGGNAKLALSNLDENPIWLNKEKGITIKRVKISGVSNVESLHVKKDHFGEPILDQVGNEIPVDFVSTGNNHHVAIYEDEKGNLQEEVVSFFEAVVRQNQGLPIINKNHSLGWKFLFTLKQNEYFVFPSDDFDPTDVDLMDEENYHLISPNLFRVQKFTTKDYFFRHHLETTVEDKSELKGVSFKRLGLPGLNCIKKIRINHLGKIIQVGEY

SEQ ID NO: 541 - protein, 1091 aa, Mobiluncus mulieris
MDSRKYRVGIDVGTNSVGFAAVEEDDSGSPTRFLNTMVVIHDSGVDSEQKKYAITRLASAGTARRTRRLYRTRRQRLRELDDFISNELGYPLVNLENFADPYEPWKVRADLATTKLPNDELPEAMSIALRHMARHRGWRSPYQRVEALHLHAEISKEFAALKERVVEKTGDVFSDDATPAEVLVDLMGRQKVRGADGVLSGKLRQSDNANELRKIASVQGIDDETLNRIIDRVFSSKSPKGKASERVGMDALPGQGSKPRALKAMPSFQKFRVVSVICNLRIKDSGGDARPLSMEEKEKLIDYLMSSTTDDHVTWTDVADLLHVKRSQLQGTAKEGFDGERPYTRPPVNSTWSKIKDSKIKSLVALWKTGDVDVQSAIVEALSNASVLEDSRPGADIVVAYLESLDDKELESLDKVGLPAGRASYSEDSLERLTERMLRDDCDLFEARKREFNVADDWKPPADPIYAPVGNPGVDRVLKIVNRLLMAAEREWGAPTQINIEHVRSGFSSELMQREFERENERRRAQNEEAVKAILTEKGGNSRVSKYDITRYYAVKRQHCQCLYCGTPITFSDCELDHIVPRKGVGSTNTRVNLAAACRSCNRDKSNLPFAVWAGKASNFDVSIDDAVSRVKQWQRSQNEGVREFRAFQNEVISRLLKTTEDPEIDSRSLESVAWMARELHHRVEYYFQSKGAQTQVSVYRGAVTAQARKSSGLEDKVKMIGGGGKTRLDRRHHAMDAATIALMTPGISTTLSEKNNLRDAQKFTGQSETWKDYCGRTETARKHFAVWKSNMERLTDLFNDKLENDAIPVVQPLRLRLSNSKAHDDGIGKLDSKKLGSVWSLADIDRAATPQIWTALTRCDDFDPTKGLPENANRVIRAQGVKYESEDNIPVFPSNVAAIAVRDGYAEIGSTIHHARIYRIDDGKKTFYSMIRVFAVDLLKHQAEDLFTVKLPPSAISIRTCEDSLRRALSNGTAEYLGWLVPGDEIIVDTSDKAFHTGQIGDLLRNFPVNSFRLTGFPSNSRLRLKPVLLAGEGLRDDAEDSIKKILLGQGWRPAINVLFSKGKPRIVRRNSLGIERPSSNNGLPFSWEA

SEQ ID NO: 542 - protein, 1233 aa, Mycoplasma canis
MEKKRKVTLGFDLGIASIGWAIVDSETNQVYKLGSRLFDAPDTNLERRTQRGTRRLLRRRKYRNQKFYNLVKRTEVFGLSSREAIENRFRELSIKYPNIIELKTKALSQEVCPDEIAWILHDYLKNRGYFYDEKETKEDFDQQTVESMPSYKLNEFYKKYGYFKGALSQPTESEMKDNKDLKEAFFFDFSNKEWLKEINYFFNVQKNILSETFIEEFKKIFSFTRDISKGPGSDNMPSPYGIFGEFGDNGQGGRYEHIWDKNIGKCSIFTNEQRAPKYLPSALIFNFLNELANIRLYSTDKKNIQPLWKLSSIDKLNILLNLFNLPISEKKKKLTNANINDIVKKESTKSIMLSVEDIDMIKDEWAGKEPNVYGVGLSGLNIEESAKENKFKFQDLKILNVLINLLDNVGIKFEFKDRNDIIKNLELLDNLYLFLIYQKESNNKDSSIDLFIAKNELLNIENLKLKLKEFLLGAGNEFENHNSKTHSLSKKAIDAILPKLLDNNEGWNLEAIKNYDEEIKSQIEDNSSLMAKQDKKYLNDNFLKDAILPPNVKVTFQQAILIFNKIIQKFSKDFEIDKVVIELAREMTQDQENDALKGIAKAQKSKKSLVEERLEANNIDKSVFNDKYEKLIYKIFLWISQDFKDPYTGAQISTNEIVNNKVEIDHIIPYSLCFDDSSANKVLVHKQSNQEKSNSLPYEYIKQGHSGWNWDEFTKYVKRVFVNNVDSILSKKERLKKSENLLTTSYDGYDKLGFLARNLNDTRYATILFRDQLNNYAEHHLIDNKKMFKVIAMNGAVTSFIRKNMSYDNKLRLKDRSDFSHHAYDAAIIALFSNKTKTLYNLIDPSLNGIISKRSEGYWVIEDRYTGEIKELKKEDWTSIKNNVQARKIAKEIEEYLIDLDDEVFFSRKTKRKTNRQLYNETIYGIAAKTDEDGITNYYKKEKFSILDDKDIYLRLLREREKFVINQSNPEVIDQIIEIIESYGKENNIPSRDEAINIKYTKNKINYNLYLKQYMRSLTKSLDQFSEEFINQMIANKTFVLYNPTKNTTRKIKFLRLVNDVKINDIRKNQVINKFNGKNNEPKAFYENINSLGAIVFKNSANNFKTLSINTQIAIFGDKNWDIEDFKTYNMEKIEKYKEIYGIDKTYNFHSFIFPGTILLDKQNKEFYYISSIQTVRDIIEIKFLNKIEFKDENKNPDTSKTPKRLMFGIKSIMNNYEQVDISPFGINKKIFE

SEQ ID NO: 543 - protein, 1233 aa, Mycoplasma canis
MEKKRKVTLGFDLGIASVGWAIVDSETNQVYKLGSRLFDAPDTNLERRTQRGTRRLLRRRKYRNQKFYNLVKRTEVFGLSSREAIENRFRELSIKYPNIIELKTKALSQEVCPDEIAWILHDYLKNRGYFYDEKETKEDFDQQTIESMPSYKLNEFYKKYGYFKGALSQPTESEMKDNKDLKEAFFFDFSNKEWLKEINYFFNVQKNILSETFIEEFKKIFSFTRDISKGPGSDNMPSPYGIFGEFGDNGQGGRYEHIWDKNIGKCSIFTNEQRAPKYLPSALIFNFLNELANIRLYSTDKKNIQPLWKLSSIDKLNILLNLFNLPISEKKKKLTSANINDIVKKESTKSIMLSVEDIDMIKDEWAGKEPNVYGVGLSGLNIEESAKENKFKFQDLKILNVLINLLDNVGIKFEFKDRNDIIKNLELLDNLYLFLIYQKESNNKDSSIDLFIAKNESLNIENLKLKLKEFLLGAGNEFENHNSKTHSLSKKAIDAILPKLLDNNEGWNLEAIKNYDEEIKSQIEDNSFLMAKQDKKYLNDNFLKDAILPPNVKVTFQQAILIFNKIIQKFSKDFEIDKVVIELAREMTQDQENDALKGIAKAQKSKKSLVEERLEANNIDKSVFNEKYEKLIYKIFLWISQDFKDPYTGAKISANEIVDNKVEIDHIIPYSLCFDDSSANKVLVHKQSNQEKSNSLPYEYIKQGHSGWNWDEFTKYVKRVFVNNVDSILSKKERLKKSENLLTTSYDGYDKLGFLARNLNDTRYATILFRDQLNNYAEHHLIDDKKMFKVIAMNGAVTSFIRKNMSYDNKLRLKNRNDFSHHAYDAAIIALFSNKTKTLYNLIDPSLNGIISKRSEGYWVIEDRYTGEIKELKKEDWTSIKNNVQARKIAKEIEEYLIDLDDEVFFSRKTKRKTNRQLYNETIYGIAAKTDEDGITNYYKKEKLSILDDKDIYLRLLREREKFVINQSNPEVIDQIIEIIESYGKENNIPSRDEAINIKYTKNKINYNLYLKQYMRSLTKSLDQFSEEFINQMIANKTFVLYNPTKNTTRKIKFLRLVNDVKINDIRKNQVINKFNGKNNEPKAFYENINSLGAIVFKNSANNFKTLSINTQIAIFGDKNWDIEDFKTYNMEKIEKYKEIYGIDKTYNFHSFIFPGTILLDKQNKEFYYISSIQTVRDIIEIKFLNKIEFKDENKNQDTSKTPKRLMFGIKSIMNNYEQVDISPFGINKKIFE

SEQ ID NO: 544 - protein, 1233 aa, Mycoplasma canis; identical to SEQ ID NO: 247

SEQ ID NO: 545 - protein, 1233 aa, Mycoplasma canis
MEKKRKVTLGFDLGIASVGWAIVDSETNQVYKLGSRLFDAPDTNLERRTQRGTRRLLRRRKYRNQKFYNLVKRTEVFGLSSREAIENRFRELSIKYPNIIELKTKALSQEVCPDEIAWILHDYLKNRGYFYDEKETKEDFDQQTVESMPSYKLNEFYKKYGYFKGALSQPTESEMKDNKDLKEAFFFDFSNKEWLKEINYFFNVQKNILSETFIEEFKKIFSFTRDISKGPGSDNMPSPYGIFGEFGDNGQGGRYEHIWDKNIGKCSIFTNEQRAPKYLPSALIFNFLNELANIRLYSTDKKNIQPLWKLSSVDKLNILLNLFNLPISEKKKKLTSTNINDIVKKESIKSIMISVEDIDMIKDEWAGKEPNVYGVGLSGLNIEENAKENKFKFQDLKILNVLINLLDNVGIKFEFKDRNDIIKNLELLDNLYLFLIYQKESNNKDSSIDLFIAKNKSLNIENLKLKLKEFLLGAGNEFENHNSKSHSLSKKAIDAILPKLLDNNEGWNLEAIKNYDEEIKSQIEDNSSLMAKQDKKYLNDNFLKDAILPPNVKVTFQQAILIFNKIIQKFSKDFEIDKVVIELAREMTQDQENDALKGMAKAQKSKKSLVEERLEANNIDKSVFNDKYEKLIYKIFLWISQDFKDPYTGAQISVNEIVNNKVEIDHIIPYSLCFDDSSANKVLVHKQSNQEKSNSLPYEYIKQGHSGWNWDEFTKYVKRVFVNNVDSILSKKERLKKSENLLTTSYDGYDKLGFLARNLNDTRYATILFRDQLNNYAEHHLIDNKKMFKVIAMNGAVTSFIRKNMSYDNKLRLKDRSDFSHHAYDAAIIALFSNKTKTLYNLIDPSLNGIISKRSEGYWVIEDRYTGEIKELKKEDWTSIKNNVQARKIAKEIEEYLIDLDDEVFFSRKTKRKTNRQLYNETIYGIAAKTDEDGITNYYKKEKFSILDDKDIYLRLLREREKFVINQSNPEVIDQIIEIIESYGKENNIPSRDEAINIKYTKNKINYNLYLKQYMRSLTKSLDKFSEEFINQMIANKTFVLYNPTKNTTRKIKFLRLVNDVKINDIRKNQVINKFNGKNNEPKAFYENINSLGAIVFKNSANNFKTLSINTQIAIFGDKNWDIEDFKTYNMEKIEKYKEIYGIDKTYNFHSFIFPGTILLDKQNKEFYYISSIQTVRDIIEIKFLNKIEFKDENKNQDTSKTPKRLMFGIKSIMNNYEQVDISPFGINKKIFE

SEQ ID NO: 546 - protein, 1233 aa, Mycoplasma canis
MEKKRKVTLGFDLGIASVGWAIVDSETNQVYKLGSRLFDAPDTNLERRTQRGTRRLLRRRKYRNQKFYNLVKRTEVFGLSSREAIENRFRELSIKYPNIIELKTKALSQEVCPDEIAWILHDYLKNRGYFYDEKETKEDFDQQTVESMPSYKLNEFYKKYGYFKGALSQPTESEMKDNKDLKEAFFFDFSNKEWLKEINYFFNVQKNILSETFIEEFKKIFSFTRDISKGPGSDNMPSPYGIFGEFGDNGQGGRYEHIWDKNIGKCSIFTNEQRAPKYLPSALIFNFLNELANIRLYSTDKKNIQPLWKLSSVDKLNILLNLFNLPISEKKKKLTSTNINDIVKKESIKSIMLSVEDIDMIKYEWAGKEPNVYGVGLSGLNIEESAKENKFKFQDLKILNVLINLLDNVGIKFEFKDRNDIIKNLELLDNLYLFLIYQKESNNKDSSIDLFIAKNKSLNIENLKLKLKEFLLGAGNEFENHNSKTHSLSKKAIDAILPKLLDNNEGWNLEAIKNYDEEIKSQIEDNSSLMAKQDKKYLNDNFLKDAILPPNVKVTFQQAILIFNKIIQKFSKDFEIDKVVIELAREMTQDQENDALKGIAKAQKSKKSLVEERLEANNIDKSVFDDKYEKLIYKIFLWISQDFKDPYTGAKISANEIVNNKVEIDHIIPYSLCFDDSSANKVLVHKQSNQEKSNSLPYEYIKQGHSGWNWDEFTKYVKRVFVNNVDSILSKKERLKKSENLLTTSYDGYDKLGFLARNLNDTRYATILFRDQLNNYAEHHLIDNKKMFKVIAMNGAVTSFIRKNMSYDNKLRLKDRSDFSHHAYDAAIIALFSNKTKTLYNLIDPSLNGIISKRSEGYWVIEDRYTGEIKELKKEDWTSIKNNVQARKIAKEIEEYLIDLDDEVFFSRKTKRKTNRQLYNETIYGIAAKTDEDGITNYYKKEKFSILDDKDIYLRLLREREKFVINQSNPEVIDQIIEIIESYGKENNIPSRDEAINIKYTKNKINYNLYLKQYMRSLTKSLDQFSEEFINQMIANKTFVLYNPTKNTTRKIKFLRLVNDVKINDIRKNQVINKFNGKNNEPKAFYENINSLGAIVFKNSANNFKTLSINTQIAIFGDKNWDIEDFKTYNMEKIEKYKEIYGIDKTYNFHSFIFPGTILLDKQNKEFYYISSIQTVRDIIEIKFLNKIEFKDENKNQDTSKTPKRLMFGIKSIMNNYEQVDISPFGINKKIFE

SEQ ID NO: 547 - protein, 1239 aa, Mycoplasma cynos
MEEKRKVTLGFDLGVASVGWAIVDSETNEVYKLGSRLFDIPDTNIDRRAKRGSRRLVRRRSYRNQKFYNLIKRTKTFGFLDKEAIEKEFVLLSIKYPNIIELKVKGLQEEVSKSEAVWILHDYLKNRGYFYDDKEEKDDLENPSIESMPSYKLYEFYKEYGYFKGALSSPTESEKNKDSDLEKAIFFNFSNKEWTKEINHFFKIQKNIFSEDFKAKFMEFFSFIRDISKGPGSENMPSQYSIFGKYGDDGMGGKYQHIWDKNIGKCSIFKDKVRAPKYLPSALFFNLLNELSNIRLYSVDKREKSVLWRLSSKDKINIILNILQIILFKNDGKISNLDINKIVKNESIKSIILNEIDLDLIKDMWFEKEPNVYGIGLSGLNIEENKKENRFKFQDLKIFSVFIDLLKKSNINIEFNNEKDIIHNLKLLDELYFFLITQKYSRDKYGSIKKFILNNKSFNIDNLDEKLNIFLSISDDEFDNHNSKTHSLSKEAIYFIFPKLLHNNEGWNLEAIKNYDIDVREEISKHSFGIKKQDKKYLDDAFLDDAILPPSVKVTIKQSILIFNKIIKKFSNKFQIDNVVIELAREMTQEKEMDAQKSLNRLKKSRKKIIEERLNANNIDSKMFRDKTGEISPNYIYKIYLWISQNFKDPYTGENISANDILKNNVEIDHIIPYSLCFDDSSSNKVLVFKHSNQSKGNFLPFDMISTFSENSVWNWKEYTQYVEKTFKTNLESILDKKERVKKADNLLTSSYDGYDKLGFLARNLNDTRYATILFRDQLINYSENHLIDSKKMFKVIAMNGGVTSFIRKNMSFDSGLKVKDRSIFSHHAYDAAIIALFSNKTKILYNLINPSLDGIISKRSEGYWVLEDRLTGEIRKLNYNDWQSIKNNVEVKKIAREIESHLSNLDNVVMFSRKSKRKTNKELYNETLYGIATRIDENGIKNYYKKEKFNILEDENIYLRLLNERENFIINRSNPEVIDAIIEIFETIDKNKIPARDVAKNIKYTDNKIKYNLYLKDYMRKLVDEFPDKFRKDFIEQMIAKKIFILFNPIKNTTRKIKSLRSINNNKIEDIRKKQVLEKFNTAKNEPRSFYESLNSLGAIIFKNNLNIYKKMSISSQIATFGDKNWKIDDINTYNKEKLNKYKEIYGIDETYDFYSFIFPGTILLDEKNKEFLYISSIQTLKDKIELKFLDRIEFEKKNVNSNLKPKIKREIISTKKLMSDYKIIKISPLGINKKIFE

SEQ ID NO: 548 - protein, 1269 aa, Mycoplasma gallisepticum
MNNSIKSKPEVTIGLDLGVGSVGWAIVDNETNIIHHLGSRLFSQAKTAEDRRSFRGARRLIRRRKYKLKRFINLIWKYNSYFGFKNKEDILNNYQEQQKLHNTVLNLKLEALNAKIDPKALSWILHDYLKNRGHFYEDNRDFNVYPTEELANYFGEYGYYKGIIDSKEDNDDKLEEGLTKYKFSNQHWLEEIKKVLSNQTGLPEKFKEEYESLFSYVRNYSEGPGSINSVSPYGIYHLDEKEGKVVQKYNNIWDKTIGKCSIFPDEYRAPKNSPIAMIFNEINELSTIRSYSIYLTGWFINQEFKKAYLNKLLDLLIKTNSEKPIDARQFKKLREETIAESIGKETLKDVEREEKLEKEDHKWKLKGLKLNTNGKIQYNDLSSLAKFVHKLKQHLKLDFLLEDQYTTLDKINFLQSLFVYLGKHLRYSNRVDSANLKEFSDSNKLFERVLQEQKDDLFKLFEQTDKDDEKILAQTHSLSTKAMLLAITRMTNLDNDEDNQKNNDKGWNFEAIKNFDQKFIDITKKNNNLSLKQDKRYLDDRFINDAILSPGVKRILREATKVFNAILKQFSEEYDVTKVVIELARELSEEKELENTKNYEKLIKKNSDKISERLEALDIAEDKIEDILKSPTKSYKVLLWLQQDHIDPYSQKEIAFEDILTKTEKTEIDHIIPYSISFDDSSSNKLLVLAESNQAKSNQTPYEFITSGNAGIKWEDYEAYCRKFKDGDTSLLDSTQRSKKFAKMMKTDTSSKYDIGFLARNLNDTRYATIVFRDALKDYANNHLVEDKPMFKVVCINGGVTSFLRKNFDKSWYAKKDRDKNIHHAVDASIISIFSNETKTLFNQLTQFADYKLFKNTDGSWKKIDPKTGVVTEVTDENWKQIRVRNQVSEIAKVINKCIQDSNIERKARYSRKIENKTNISLFNDTVYSAKKVGYEDQIKRKNLKTLDIHESAEENKNSKVKKQFVYRKLVNVSLLNNDKLADLFAEKEDILMYRANPWVINLAEQIFNEYTENKKIKSQNVFEKYMLDLTKEFPEKFSEAFVKSMLRNKTAIIYNVEKKVVHRIKRLKILSSELKENKLSNVIIRSKNESGTKLSYQDTINSIALMIMRSIDPTAKKQYIRVPLNTLNLHLGDQDFDLHNIDAYLKKPKFVKYLKANEIGDEYKPWRVLTSGTLLIHKKDKKLMYISSFQNLKDVIEIKNLIETEYKENDDSDPKKKKKANRFLMTLSTILNDYILLDAKDNFDILGLSKNRIDEILNSKLGLDKITK

SEQ ID NO: 549 - protein, 1224 aa, Mycoplasma gallisepticum
MNNSIKSKPEVTIGLDLGVGSVGWAIVDNETNIIHHLGSRLFSQAKTAEDRRSFRGARRLIRRRKYKLKRFINLIWKYNSYFGFKNKEDILNNYQEQQKLHNTVLNLKLEALNAKIDPKALSWILHDYLKNRGHFYEDNRDFNVYPTEELANYFGEYGYYKGIIDSKEDNDDKLEEGLTKYKFSNQHWLEEIKKVLSNQTGLPEKFKEEYESLFSYVRNYSEGPGSINSVSPYGIYHLDEKEGKVVQKYNNIWDKTIGKCSIFPDEYRAPKNSPIAMIFNEINELSTIRSYSIYLTGWFINQEFKKAYLNKLLDLLIKTNSEKPIDARQFKKLREETIAESIGKETLKDVEREEKLEKEDHKWKLKGLKLNTNGKIQYNDLSSLAKFVHKLKQHLKLDFLLEDQYTTLDKINFLQSLFVYLGKHLRYSNRVDSANLKEFSDSNKLFERVLQEQKDDLFKLFEQTDKDDEKILAQTHSLSTKAMLLAITRMTNLDNDEDNQKNNDKGWNFEAIKNFDQKFIDITKKNNNLSLKQDKRYLDDRFINDAILSPGVKRILREATKVFNAILKQFSEEYDVTKVVIELARELSEEKELENTKNYEKLIKKNSDKISERLEALDIAEDKIEDILKSPTKSYKVLLWLQQDHIDPYSQKEIAFEDILTKTEKTEIDHIIPYSISFDDSSSNKLLVLAESNQAKSNQTPYEFITSGNAGIKWEDYEAYCRKFKDGDTSLLDSTQRSKKFAKMMKTDTSSKYDIGFLARNLNDTRYATIVFRDALKDYANNHLVEDKPMFKVVCINGGVTSFLRKNFDKSWYAKKDRDKNIHHAVDASIISIFSNETKTLFNQLTQFADYKLFKNTDGSWKKIDPKTGVVTEVTDENWKQIRVRNQVSEIAKVINKCIQDSNIERKARYSRKIENKTNISLFNDTVYSAKKVGYEDQIKRKNLKTLDIHESAEENKNSKVKKQFVYRKLVNVSLLNNDKLADLFAEKEDILMYRANPWVINLAEQIFNEYTENKKIKSQNVFEKYMLDLTKEFPEKFSEAFVKSMLRNKTAIIYNVEKKVVHRIKRLKILSSELKENKLSNVIIRSKNESGTKLSYQDTINSIALMIMRSIDPTAKKQYIRVPLNTLNLHLGDQDFDLHNIDAYLKKPKFVKYLKANEIGDEYKPWRVLTSGTLLIHKKDKKLMYISSFQNLKDVIEIKNLIETEYKENDDSDPKKRRKQIGS

SEQ ID NO: 550 - protein, 1269 aa, Mycoplasma gallisepticum; identical to SEQ ID NO: 138

SEQ ID NO: 551 - protein, 226 aa, Mycoplasma iowae
MSNKKKITIGLDIGVSSVGWSILREDNVLIDYGSRLFPDAANAKDGKLENEARRSHRSMRRRIRRIKTRKNDLIKLLIKYNIISDQDELAKILEQGIVNETGNVPIVEIKYKGLKEKLSKEELLICLYHYIHKRGYFYITEEDLKENGENINRLPTEIQYDFYMKNGYYIGNEDNQKFSNLIWVKEIEKFLSKQSLDSNFVDEYISLFRRVRDYSDGPGSEKSPTP

SEQ ID NO: 552 - protein, 1304 aa, Mycoplasma synoviae
MLNNVQNLWKYLLLLIFDKKIIFLFKIKVILIRRYMENNNKEKIVIGFDLGVASVGWSIVNAETKEVIDLGVRLFSEPEKADYRRAKRTTRRLLRRKKFKREKFHKLILKNAEIFGLQSRNEILNVYKDQSSKYRNILKLKINALKEEIKPSELVWILRDYLQNRGYFYKNEKLTDEFVSNSFPSKKLHEHYEKYGFFRGSVKLDNKLDNKKDKAKEKDEEEESDAKKESEELIFSNKQWINEIVKVFENQSYLTESFKEEYLKLFNYVRPFNKGPGSKNSRTAYGVFSTDIDPETNKFKDYSNIWDKTIGKCSLFEEEIRAPKNLPSALIFNLQNEICTIKNEFTEFKNWWLNAEQKSEILKFVFTELFNWKDKKYSDKKFNKNLQDKIKKYLLNFALENFNLNEEILKNRDLENDTVLGLKGVKYYEKSNATADAALEFSSLKPLYVFIKFLKEKKLDLNYLLGLENTEILYFLDSIYLAISYSSDLKERNEWFKKLLKELYPKIKNNNLEIIENVEDIFEITDQEKFESFSKTHSLSREAFNHIIPLLLSNNEGKNYESLKHSNEELKKRTEKAELKAQQNQKYLKDNFLKEALVPLSVKTSVLQAIKIFNQIIKNFGKKYEISQVVIEMARELTKPNLEKLLNNATNSNIKILKEKLDQTEKFDDFTKKKFIDKIENSVVFRNKLFLWFEQDRKDPYTQLDIKINEIEDETEIDHVIPYSKSADDSWFNKLLVKKSTNQLKKNKTVWEYYQNESDPEAKWNKFVAWAKRIYLVQKSDKESKDNSEKNSIFKNKKPNLKFKNITKKLFDPYKDLGFLARNLNDTRYATKVFRDQLNNYSKHHSKDDENKLFKVVCMNGSITSFLRKSMWRKNEEQVYRFNFWKKDRDQFFHHAVDASIIAIFSLLTKTLYNKLRVYESYDVQRREDGVYLINKETGEVKKADKDYWKDQHNFLKIRENAIEIKNVLNNVDFQNQVRYSRKANTKLNTQLFNETLYGVKEFENNFYKLEKVNLFSRKDLRKFILEDLNEESEKNKKNENGSRKRILTEKYIVDEILQILENEEFKDSKSDINALNKYMDSLPSKFSEFFSQDFINKCKKENSLILTFDAIKHNDPKKVIKIKNLKFFREDATLKNKQAVHKDSKNQIKSFYESYKCVGFIWLKNKNDLEESIFVPINSRVIHFGDKDKDIFDFDSYNKEKLLNEINLKRPENKKFNSINEIEFVKFVKPGALLLNFENQQIYYISTLESSSLRAKIKLLNKMDKGKAVSMKKITNPDEYKIIEHVNPLGINLNWTKKLENNN

SEQ ID NO: 553 - protein, 1401 aa, Myroides injenensis
MKRILGLDLGTTSIGWAYVHEAENVNETSSIQKVGVRVNPLTTEEQTNFEKGKPITTNASRTLARSARRNLQRYKLRRDNLIQILKENNWINNTTSLTETGNHSTFETYELRNKAASEKLTLDQLSRVLLMLNKKRGYKSSRKVNSKEEGQLIDGMEVAKKLYHEQLTPGQLSLQLMNQGVKKLPDYYRSDLNQELESIWNFQQQFYPNILTDKFKEEINGKGLTSTSSAFWNIYNFNTAENKGSRDEKKKQALQWRSEALSKQLSKEIVAYIIADLNGQIYNSSGYLGAISDRSKELYFNNLTVGQYLFKQLKSNPHTSLKNQVFYRQDYLNEFEKIWETQSKFYPKELTAALKREIRDVIIFYQRKLKSQKGLISFCEFEQKQKTINGKTKTIGHRVIPKSSPLFQEFKIWQQLHNVVLRNKKTNEIVSLADEQKVHLFEELNLKGKLKSNQVLKLIENKPKDWELNYTELEGNNTNKALYNAYLDILDIEGYDVRNELKVKLNKDDIELSDLDVNASEIKEMIFSVFKHLGINTEILEFDATLEDKVFEKQASYQLWHLLYSYEEDNSPTGLDRLYNLLHKKFGFKLNHAKLIGNVLFQDDYGSLSSKAIKNIFPYITENNYYTACELAGYKHSKHSLTKEENETRELKNRLTILPKNSLRNPVVEKIINQMINVVNTLIDEENNILIAQGKEPNFQFDEIRIELARELKKNAKEREELTKSINKSKTDHEKIIKILQKEDGIKNPTRNDIVRFKLYSELKNNGYKDLYTNEYIERKDIFTKEYDIEHIIPQSKLFDDSFSNKTLVRRNVNLKKGNQTAYDFILCEYGQEKANEFETRITNLYNLGKDEGISKSKFKKLLMQESEIGNGFIERDLRETQYIAKKAKSLLLEITRNVISTSGSITDRLREDWGLINVMKELNLQKYRDAGLTEFVKMKDGNKKEVIIDWTKRNDHRHHAMDALTIAFTKHNHIQYLNHLNARKNVNNELHNNIIAIEKLETTLVSDERGNKKRIFKEPIANFRTIAKSHLEAILVSHKAKNKVVTKNINKISGKKISQQTLTPRGQLHKETIYGKIRQYVSKQEKVGPKFTIEVIEQVSNPTYRNLLLKRLEENNNDPKKAFGGKNSLNKNPIYINLEKNIKVPEVLKLVWLEDNYTIRKEISPDLKIDKVIDQGVKQILQNRLAQYKGDSKLAFSNLDANPIWLNEDKGIAIKRVTISGIATAQPLHRKKDHLGQPILDHNGQEIPVDFISTGNNHHVAIYEDENGKLQESVVSHFEAVERVNQKLPIIDKTFNQHLGWKFLFTMKQNELFLFPSDDFNPNEIDLFDKQNYTVISKHLFRIQKLSTKDYSFRHHLETNVEEIKDLKTITWRREGLNGIQNIIKVRTNHLGEIIHIGEY

SEQ ID NO: 554 - protein, 1466 aa, Myroides odoratus
MKNILGLDLGTNSIGWALVKEDFENKQGEILGLGSRIIPMSQDILGEFGRGNSISQTADRTGYRGVRRLRERHLLRRERLHRVLNILGFLPNHYAKEIDFTKRLGKFINHAEPKLSFDKEFIFKDSFNEMLKDFQQNQPGFIINKHGEEALVPYDWTIYYLRKKALTQKIDKEELAWILLNFNQKRGYYQLRGEEEEENTNKLVEFYSLKIIDVIADNEVNKKGEVWYSLHLENGWIYRRSSKISLVDWKDKVRDFIVTTDVNDDGSEKLDKDGVVKRSFRAPSADDWTLLKKKTEQDIDNSNKTVGAYIYENLLLNPKQKIKGKLVRTIERKFYKDELKQILEKQKEFHQELQNEQLLQDCVRELYKYNEQHQQMLESKDFVHLFLNDIIFYQRPLRSQKSLISNCTLEKRVSRDGVVFPIKVISKSNPYYQEFRLLQWLQNLAIYRKDDDVNVTQEFLNSIESWENLLQFLNAKKEIKQEQLIKFLLEQKGLKGNSLKTAILTYRWNYVTDKVYPMNETRSLIQDKLKKVENVATDFLSFDNEMALWHIIYSVNDKIEYEKALAKFASKHNLDEISFVESFKKFPPFKSDYGSFSEKAIKKLLPLMRFGSVWNKNNIVPSVLDRIDKILTGEYDEKIKIRVREKAEQFQLNQIEDFQNLPLWLAQYVVYDRHSEAEIAGKWNSVKDLENYLKEFKQHSLRNPIVEQIITETLRVVKDIWQQYGNGVQNFFDEIHIELGREMKNTADERKRITNSVTENENTNLRIKALLVELKEDTNIENVRPHSPMQQEILKIYEEGVLNAVENIDEDILKISKTAQPSKSELIRYKLWLEQKYQSPYTGEMIPLSRLFTSDYEIEHVIPQSRYFDDSLSNKVICEAAVNKRKDNQLGLEFIKNHHSEKIELGNGRTAQVLEVEAYESFVKKNYDKNRGKRNKLLLEDVPEKMIERQLNDTRYISKFVTHLLSNIVRKDEVNSKDDGINSKNIIPGNGKITSQLKQDWGLNDVWNELILPRFERMNNLTNSTDFTSTNTNGKIIPTVPLEYSKGFSKKRIDHRHHALDALVIALATRDHVNLLNNESALPKKDRTKEEQKSFRFDLQVNLRNKEKYFNVKEGREKEKFTTFKKPWNTLTQDTRDALENMVVSFKQNLRVINKATNYYESYTDENGNLRLDKYGNPKKELISQKGTNWAIRKSLHKETVSGQIHLDRVKVTKGKIVTATRKSLDSSFNEKSIESITDTGIQKILRNYLKAKDNKPDVAFSPEGIEELNKSISVYNEGKNHQPIIKVRIFEQGSKFPVGETGNKIAKFVEAAKGTNLFFGIYQDKTGKRSYDTIPLNLVIERLKQGLSPVPETNEKGHQLLFHLSPNDLVYVPTIDDNEQLDSNRVYKFTDSSDTTCNFIPSNISAIIFNINSKEQEKRGINYPIQNELGVGSPQSKNQKSFDGFMIKEVCIKLKVDRLGNISKT

SEQ ID NO: 555 - protein, 241 aa, Neisseria lactamica
MAAFKPNPMNYILGLDIGIASVGWAMVEIDKEENPIRLIDLGVRVFERAEMPKTGDSLAMARRLARSVRRLTRRRAHRLLRARRLLKREGVLQDADFDENGLVKSLPNTPWQLRAAALDRKLTCLEWSAVLLHLIKHRGYLSQRKNEGETADKELGALLKGVADNAHALQTGDFRTPAELALNKFEKESGHIRNQRGDYSHTFSRKDLQAELNLLFEKQKEFGNPHVSDGLKEGIETLLMA

SEQ ID NO: 556 - protein, 666 aa, Neisseria lactamica
MAAFKPNPMNYILGLDIGIASVGWAMVEVDEEENPIRLIDLGVRVFERAEVPKTGDSLAMARRLARSVRRLTRRRAHRLLRARRLLKREGVLQDADFDENGLVKSLPNTPWQLRAAALDRKLTCLEWSAVLLHLVKHRGYLSQRKNEGETADKELGALLKGVADNAHALQTGDFRTPAELALNKFEKESGHIRNQRGDYSHTFSRKDLQAELNLLFEKQKEFGNPHVSDGLKEDIETLLMAQRPALSGDAVQKMLGHCTFEPAEPKAAKNTYTAERFIWLTKLNNLRILEQGSERPLTDTERATLMDEPYRKSKLTYAQARKLLGLEDTAFFKGLRYGKDNAEASTLMEMKAYHAISRALEKEGLKDKKSPLNLSTELQDEIGTAFSLFKTDKDITGRLKDRVQPEILEALLKHISFDKFVQISLKALRRIVPLMEQGKRYDEACAEIYGDHYCKKNAEEKIYLPPIPADEIRNPVVLRALSQARKVINCVVRRYGSPARIHIETAREVGKSFKDRKEIEKRQEENRKDREKAAAKFREYFPNFVGEPKSKDILKLRLYEQQHGKCLYSGKEINLVRLNEKGYVEIDHALPFSRTWDDSFNNKVLVLGSENQNKGNQTPYEYFNGKDNSREWQEFKARVETSRFPRSKNNGFCCKNSMKKDLKNAT

SEQ ID NO: 557 - protein, 828 aa, Neisseria lactamica
MLGHCTFEPAEPKAAKNTYTAERFIWLTKLNNLRILEQGSERPLTDTERATLMDEPYRKSKLTYAQARKLLGLEDTAFFKGLRYGKDNAEASTLMEMKAYHAISRALEKEGLKDKKSPLNLSTELQDEIGTAFSLFKTDKDITGRLKDRVQPEILEALLKHISFDKFVQISLKALRRIVPLMEQGKRYDEACAEIYGDHYGKKNTEEKIYLPPIPADEIRNPVVLRALSQARKVINAVVRRYDSPARIHIETAREVGKSFKDRKEIEKRQEENRKDREKAAAKFREYFPNFVGEPKSKDILKLRLYEQQHGKCLYSGKEINLVRLNEKGYVEIDHALPFSRTWDDSFNNKVLVLGSENQNKGNQTPYEYFNGKDNSREWQEFKARVETSRFPRSKKQRILLQKFDEEGFKERNLNDTRYVNRFLCQFVADHILLTGKGKRRVFASNGQITNLLRGFWGLRKVRAENDRHHALDAVVVACSTVAMQQKITRFVRYKEMNAFDGKTIDKETGEVLHQKAHFPQPWEFFAQEVMIRVFGKPDGKPEFEEADTSEKLRTLLAEKLSSRPEAVHEYVTPLFVSRAPNRKMSGQGHMETVKSAKRLDEGISVLRVPLTQLKLKDLEKMVNREREPKLYDALKAQLETHKDDPAKAFAEPFYKYDKAGSRTQQVKAVRIEQVQKTGVWVRNHNGIADNATMVRVDVFEKGGKYYLVPIYSWQVAKGILPDRAVVAFKDEEDWTVMDDSFEFRFVLYANDLIKAELKKETFFGYFSGLDRSTGNISLRSHDLDKTKGKDGVYRIGIKTALSFQKHQIDELGKEIRPCRLKKRPPVR

SEQ ID NO: 558 - protein, 408 aa, Neisseria lactamica
MNDTRYVNRFLCQFVADHILLTGKGKRRVFASNGQITNLLRGFWGLRKVRTENDRHHALDAVVVACSTVAMQQKITRFVRYKEMNAFDGKTIDKETGEVLHQKAHFPQPWEFFAQEVMIRVFGKPDGKPEFEEADTPEKLRTLLAEKLSSRPEAVHEYVTPLFVSRAPNRKMSGQGHMETVKSAKRLDEGISVLRVPLTQLKLKGLEKMVNREREPKLYDALKAQLETHKDDPAKAFAEPFYKYDKAGSRTQQVKAVRIEQVQKTGVWVRNHNGIADNATMVRVDVFEKGGKYYLVPIYSWQVAKGILPDRAVVAFKDEEDWTVMDDSFEFRFVLYANDLIKLTAKKNEFLGYFVSLNRATGAIDIRTHDTDSTKGKNGIFQSVGVKTALSFQKTKSTNSAKKSDHAV

SEQ ID NO: 559 - protein, 1082 aa, Neisseria meningitidis
MAAFKPNPINYILGLDIGIASVGWAMVEIDEDENPICLIDLGVRVFERAEVPKTGDSLAAARRLARSVRRLTRRRAHRLLRARRLLKREGVLQAADFDENGLIKSLPNTPWQLRAAALDRKLTPLEWSAVLLHLIKHRGYLSQRKNEGETADKELGALLKGVADNAHALQTGDFRTPAELALNKFEKESGHIRNQRGDYSHTFSRKDLQAELILLFEKQKEFGNPHVSGGLKEGIETLLMTQRPALSGDAVQKMLGHCTFEPAEPKAAKNTYTAERFIWLTKLNNLRILEQGSERPLTDTERATLMDEPYRKSKLTYAQARKLLGLEDTAFFKGLRYGKDNAEASTLMEMKAYHAISRALEKEGLKDKKSPLNLSPELQDEIGTAFSLFKTDEDITGRLKDRVQPEILEALLKHISFDKFVQISLKALRRIVPLMEQGKRYDEACAEIYGDHYGKKNTEEKIYLPPIPADEIRNPVVLRALSQARKVINGVVRRYGSPARIHIETAREVGKSFKDRKEIEKRQEENRKDREKAAAKFREYFPNFVGEPKSKDILKLRLYEQQHGKCLYSGKEINLGRLNEKGYVEIDHALPFSRTWDDSFNNKVLVLGSENQNKGNQTPYEYFNGKDNSREWQEFKARVETSRFPRSKKQRILLQKFDEDGFKERNLNDTRYVNRFLCQFVADRMRLTGKGKKRVFASNGQITNLLRGFWGLRKVRAENDRHHALDAVVVACSTVAMQQKITRFVRYKEMNAFDGKTIDKETGEVLHQKTHFPQPWEFFAQEVMIRVFGKPDGKPEFEEADTPEKLRTLLAEKLSSRPEAVHEYVTPLFVSRAPNRKMSGQGHMETVKSAKRLDEGVSVLRVPLTQLKLKDLEKMVNREREPKLYEALKARLEAHKDDPAKAFAEPFYKYDKAGNRTQQVKAVRVEQVQKTGVWVRNHNGIADNATMVRVDVFEKGDKYYLVPIYSWQVAKGILPDRAVVQGKDEEDWQLIDDSFNFKFSLHPNDLVEVITKKARMFGYFASCHRGTGNINIRIHDLDHKIGKNGILEGIGVKTALSFQKYQIDELGKEIRPCRLKKRPPVR

SEQ ID NO: 560 - protein, 976 aa, Neisseria meningitidis
MAAFKPNPINYILGLDIGIASVGWAMVEIDEDENPICLIDLGVRVFERAEVPKTGDSLAAARRLARSVRRLTRRRAHRLLRARRLLKREGVLQAADFDENGLIKSLPNTPWQLRAAALDRKLTPLEWSAVLLHLIKHRGYLSQRKNEGETADKELGALLKGVADNAHALQTGDFRTPAELALNKFEKESGHIRNQRGDYSHTFSRKDLQAELILLFEKQKEFGNPHVSGGLKEGIETLLMTQRPALSGDAVQKMLGHCTFEPAEPKAAKNTYTAERFIWLTKLNNLRILEQGSERPLTDTERATLMDEPYRKSKLTYAQARKLLGLEDTAFFKGLRYGKDNAEASTLMEMKAYHAISRALEKEGLKDKKSPLNLSPELQDEIGTAFSLFKTDEDITGRLKDRIQPEILEALLKHISFDKFVQISLKALRRIVPLMEQGKRYDEACAEIYGDHYGKKNTEEKIYLPPIPADEIRNPVVLRALSQARKVINGVVRRYGSPARIHIETAREVGKSFKDRKEIEKRQEENRKDREKAAAKFREYFPNFVGEPKSKDILKLRLYEQQHGKCLYSGKEINLGRLNEKGYVEIDHALPFSRTWDDSFNNKVLVLGSENQNKGNQTPYEYFNGKDNSREWQEFKARVETSRFPRSKKQRILLQKFDEDGFKERNLNDTRYVNRFLCQFVADRMRLTGKGKKRVFASNGQITNLLRGFWGLRKVRAENDRHHALDAVVVACSTVAMQQKITRFVRYKEMNAFDGKTIDKETGEVLHQKTHFPQPWEFFAQEVMIRVFGKPDGKPEFEEADTPEKLRTLLAEKLSSRPEAVHEYVTPLFVSRAPNRKMSGQGHMETVKSAKRLDEGVSVLRVPLTQLKLKDLEKMVNREREPKLYEALKARLEAHKDDPAKAFAEPFYKYDKAGNRTQQVKAVRVEQVQKTGVWVRNHNGIADNATMVRVDVFEKGDKYYLVPIYSWQVAKGIFAG

SEQ ID NO: 561 - protein, 1081 aa, Neisseria meningitidis
MAAFKPNPINYILGLDIGIASVGWAMVEIDEDENPICLIDLGVRVFERAEVPKTGDSLAAARRLARSVRRLTRRRAHRLLRARRLLKREGVLQAADFDENGLIKSLPNTPWQLRSAALDRKLTPLEWSAVLLHLIKHRGYLSQRKNEGETADKELGALLKGVADNAHALQTGDFRTPAELALNKFEKESGHIRNRRGDYSHTFSRKDLQAELDLLFEKQKEFGNPHISDDLKEGIETLLMTQRPALSGDAVQKMLGHCTFEPTEPKAAKNTYTAERFVWLTKLNNLRILEQGSERPLTDTERATLMDEPYRKSKLTYAQARKLLELDDTAFFKGLRYGKDNAEASTLMEMKAYHAISRALEKEGLKDKKSPLNLSPELQDEIGTAFSLFKTDEDITGRLKDRVQPEILEVLLKHISFDKFVQISLKALRRIVPLMEQGKRYDEACAEIYGDHDGKKNTEEKIYLPPIPADEIRNPVVLRALSQARKVINAVVRRYGSPARIHIETAREVGKSFKDRKEIEKRQEENRKDREKAAAKFREYFPNFVGEPKSKDILKLRLYEQQHGKCLYSGKEINLGRLNEKGYVEIDHALPFSRTWDDSFNNKVLVLGSENQNKGNQTPYEYFNGKDNSREWQEFKARVETSRFPRSKKQRILLQKFDEEGFKERNLNDTRYVNRFLCQFVADHMLLTGKGKRRVFASNGQITNLLRGFWGLRKVRAENNRHHALDAVVVACSTVAMQQKITRFVRYKEMNAFDGKTIDKETGEVLHQKTHFPQPWEFFAQEVMIRVFGKPDGKPEFEEADTPEKLRTLLAEKLSSRPEAVHEYVTPLFVSRAPNRKMSGQGHMETVKSAKRLDEGVSVLRVPLTQLKLKDLEKMVNREREPKLYEALKARLEAHKDDPAKAFAEPFYKYDKAGNRTQQVKAVRVEQVQKTGVWVRNHNGIADNATMVRVDVFEKAGKYYLVPIYSWQVAKGILPDRAVVAYADEEGWTVIDESFRFKFVLYSNDLIKVQLKKDSFLGYFSGLDRATGAISLREHDLEKSKGKDGMHRIGVKTALSFQKYQIDEMGKEIRLCRLKKRPPVR

SEQ ID NO: 562 - protein, 1081 aa, Neisseria meningitidis
MAAFKPNPINYILGLDIGIASVGWAMVEIDEDENPICLIDLGVRVFERAEVPKTGDSLAAARRLARSVRRLTRRRAHRLLRARRLLKREGVLQAADFDENGLIKSLPNTPWQLRSAALDRKLTPLEWSAVLLHLIKHRGYLSQRKNEGETADKELGALLKGVANNAHALQTGDFRTPAELALNKFEKESGHIRNQRGDYSHTFSRKDLQAELILLFEKQKEFGNPHVSGGLKEGIETLLMTQRPALSGDAVQKMLGHCTFEPAEPKAAKNTYTAERFIWLTKLNNLRILEQGSERPLTDTERATLMDEPYRKSKLTYAQARKLLGLEDTAFFKGLRYGKDNAEASTLMEMKAYHAISRALEKEGLKDKKSPLNLSPELQDEIGTAFSLFKTDEDITGRLKDRIQPEILEALLKHISFDKFVQISLKALRRIVPLMEQGKRYDEACAEIYGDHYGKKNTEEKIYLPPIPADEIRNPVVLRALSQARKVINGVVRRYGSPARIHIETAREVGKSFKDRKEIEKRQEENRKDREKAAAKFREYFPNFVGEPKSKDILKLRLYEQQHGKCLYSGKEINLGRLNEKGYVEIDHALPFSRTWDDSFNNKVLVLGSENQNKGNQTPYEYFNGKDNSREWQEFKARVETSRFPRSKKQRILLQKFDEDGFKERNLNDTRYVNRFLCQFVADRMRLTGKGKKRVFASNGQITNLLRGFWGLRKVRAENDRHHALDAVVVACSTVAMQQKITRFVRYKEMNAFDGKTIDKETGEVLHQKTHFPQPWEFFAQEVMIRVFGKPDGKPEFEEADTPEKLRTLLAEKLSSRPEAVHEYVTPLFVSRAPNRKMSGQGHMETVKSAKRLDEGVSVLRVPLTQLKLKDLEKMVNREREPKLYEALKARLEAHKDDPAKAFAEPFYKYDKAGNRTQQVKAVRVEQVQKTGVWVRNHNGIADNATMVRVDVFEKAGKYYLVPIYSWQVAKGILPDRAVVAYADEEGWTVIDESFRFKFVLYSNDLIKVQLKKDSFLGYFSGLDRATGAISLREHDLEKSKGKDGMHRIGVKTALSFQKYQIDEMGKEIRLCRLKKRPPVR

SEQ ID NO: 563 - protein, 1082 aa, Neisseria meningitidis
MAAFKPNPINYILGLDIGIASVGWAMVEIDEDENPICLIDLGVRVFERAEVPKTGDSLAMARRLARSVRRLTRRRAHRLLRARRLLKREGVLQAADFDENGLIKSLPNTPWQLRAAALDRKLTPLEWSAVLLHLIKHRGYLSQRKNEGETADKELGALLKGVADNAHALQTGDFRTPAELALNKFEKESGHIRNQRGDYSHTFSRKDLQAELILLFEKQKEFGNPHVSGGLKEGIETLLMTQRPALSGDAVQKMLGHCTFEPAEPKAAKNTYTAERFIWLTKLNNLRILEQGSERPLTDTERATLMDEPYRKSKLTYAQARKLLGLEDTAFFKGLRYGKDNAEASTLMEMKAYHAISRALEKEGLKDKKSPLNLSPELQDEIGTAFSLFKTDEDITGRLKDRIQPEILEALLKHISFDKFVQISLKALRRIVPLMEQGKRYDEACAEIYGDHYGKKNTEEKIYLPPIPADEIRNPVVLRALSQARKVINGVVRRYGSPARIHIETAREVGKSFKDRKEIEKRQEENRKDREKAAAKFREYFPNFVGEPKSKDILKLRLYEQQHGKCLYSGKEINLGRLNEKGYVEIDHALPFSRTWDDSFNNKVLVLGSENQNKGNQTPYEYFNGKDNSREWQEFKARVETSRFPRSKKQRILLQKFDEDGFKERNLNDTRYVNRFLCQFVADRMRLTGKGKKRVFASNGQITNLLRGFWGLRKVRAENDRHHALDAVVVACSTVAMQQKITRFVRYKEMNAFDGKTIDKETGEVLHQKTHFPQPWEFFAQEVMIRVFGKPDGKPEFEEADTPEKLRTLLAEKLSSRPEAVHEYVTPLFVSRAPNRKMSGQGHMETVKSAKRLDEGVSVLRVPLTQLKLKDLEKMVNREREPKLYEALKARLEAHKDDPAKAFAEPFYKYDKAGNRTQQVKAVRVEQVQKTGVWVRNHNGIADNATMVRVDVFEKGDKYYLVPIYSWQVAKGILPDRAVVQGKDEEDWQLIDDSFNFKFSLHPNDLVEVITKKARMFGYFASCHRGTGNINIRIHDLDHKIGKNGILEGIGVKTALSFQKYQIDELGEEIRPCRLKKRPPVR

SEQ ID NO: 564 - protein, 1082 aa, Neisseria meningitidis
MAAFKPNPINYILGLDIGIASVGWAMVEIDEDENPICLIDLGVRVFERAEVPKTGDSLAMARRLARSVRRLTRRRAHRLLRARRLLKREGVLQAADFDENGLIKSLPNTPWQLRAAALDRKLTPLEWSAVLLHLIKHRGYLSQRKNEGETADKELGALLKGVADNAHALQTGDFRTPAELALNKFEKESGHIRNQRGDYSHTFSRKDLQAELILLFEKQKEFGNPHVSGGLKEGIETLLMTQRPALSSDAVQKMLGHCTFEPAEPKAAKNTYTAERFIWLTKLNNLRILEQGSERPLTDTERATLMDEPYRKSKLTYAQARKLLGLEDTAFFKGLRYGKDNAEASTLMEMKAYHAISRALEKEGLKDKKSPLNLSPELQDEIGTAFSLFKTDEDITGRLKDRIQPEILEALLKHISFDKFVQISLKALRRIVPLMEQGKRYDEACAEIYGDHYGKKNTEEKIYLPPIPADEIRNPVVLRALSQARKVINGVVRRYGSPARIHIETAREVGKSFKDRKEIEKRQEENRKDREKAAAKFREYFPNFVGEPKSKDILKLRLYEQQHGKCLYSGKEINLGRLNEKGYVEIDHALPFSRTWDDSFNNKVLVLGSENQNKGNQTPYEYFNGKDNSREWQEFKARVETSRFPRSKKQRILLQKFDEDGFKERNLNDTRYVNRFLCQFVADRMRLTGKGKKRVFASNGQITNLLRGFWGLRKVRAENDRHHALDAVVVACSTVAMQQKITRFVRYKEMNAFDGKTIDKETGEVLHQKTHFPQPWEFFAQEVMIRVFGKPDGKPEFEEADTPEKLRTLLAEKLSSRPEAVHEYVTPLFVSRAPNRKMSGQGHMETVKSAKRLDEGVSVLRVPLTQLKLKDLEKMVNREREPKLYEALKARLEAHKDDPAKAFAEPFYKYDKAGNRTQQVKAVRVEQVQKTGVWVRNHNGIADNATMVRVDVFEKGDKYYLVPIYSWQVAKGILPDRAVVQGKDEEDWQLIDDSFNFKFSLHPNDLVEVITKKARMFGYFASCHRGTGNINIRIHDLDHKIGKNGILEGIGVKTALSFQKYQIDELGKEIRPCRLKKRPPVR

SEQ ID NO: 565 - protein, 1082 aa, Neisseria meningitidis
MAAFKPNPINYILGLDIGIASVGWAMVEIDEDENPICLIDLGVRVFERAEVPKTGDSLAMARRLARSVRRLTRRRAHRLLRARRLLKREGVLQAADFDENGLIKSLPNTPWQLRAAALDRKLTPLEWSAVLLHLIKHRGYLSQRKNEGETADKELGALLKGVADNAHALQTGDFRTPAELALNKFEKESGHIRNQRGDYSHTFSRKDLQAELILLFEKQKEFGNPHVSGGLKEGIETLLMTQRPALSSDAVQKMLGHCTFEPAEPKAAKNTYTAERFIWLTKLNNLRILEQGSERPLTDTERATLMDEPYRKSKLTYAQARKLLGLEDTAFFKGLRYGKDNAEASTLMEMKAYHAISRALEKEGLKDKKSPLNLSPELQDEIGTAFSLFKTDEDITGRLKDRIQPEILEALLKHISFDKFVQISLKALRRIVPLMEQGKRYDEACAEIYGDHYGKKNTEEKIYLPPIPADEIRNPVVLRALSQARKVINGVVRRYGSPARIHIETAREVGKSFKDRKEIEKRQEENRKDREKAAAKFREYFPNFVGEPKSKDILKLRLYEQQHGKCLYSGKEINLGRLNEKGYVEIDHALPFSRTWDDSFNNKVLVLGSENQNKGNQTPYEYFNGKDNSREWQEFKARVETSRFPRSKKQRILLQKFDEDGFKERNLNDTRYVNRFLYQFVADRMRLTGKGKKRVFASNGQITNLLRGFWGLRKVRAENDRHHALDAVVVACSTVAMQQKITRFVRYKEMNAFDGKTIDKETGEVLHQKTHFPQPWEFFAQEVMIRVFGKPDGKPEFEEADTPEKLRTLLAEKLSSRPEAVHEYVTPLFVSRAPNRKMSGQGHMETVKSAKRLDEGVSVLRVPLTQLKLKDLEKMVNREREPKLYEALKARLEAHKDDPAKAFAEPFYKYDKAGNRTQQVKAVRVEQVQKTGVWVRNHNGIADNATMVRVDVFEKGDKYYLVPIYSWQVAKGILPDRAVVQGKDEEDWQLIDDSFNFKFSLHPNDLVEVITKKARMFGYFASCHRGTGNINIRIHDLDHKIGKNGILEGIGVKTALSFQKYQIDELGKEIRPCRLKKRPPVR

SEQ ID NO: 566 - protein, 1081 aa, Neisseria meningitidis
MAAFKPNPINYILGLDIGIASVGWAMVEIDEDENPICLIDLGVRVFERAEVPKTGDSLAMARRLARSVRRLTRRRAHRLLRARRLLKREGVLQAADFDENGLIKSLPNTPWQLRAAALDRKLTPLEWSAVLLHLIKHRGYLSQRKNEGETADKELGALLKGVADNAHALQTGDFRTPAKLALNKFEKESGHIRNQRGDYSHTFSRKDLQAELNLLFEKQKEFGNPHISDGLKEGIETLLMTQRPALSGDAVQKMLGHCTFEPTEPKAAKNTYTAERFVWLTKLNNLRILEQGSEQPLTDTQRAKLMDEPYRKSKLTYAQARKLLGLEDTAFFKGLRYGKDNAEASTLMEMKAYHAISRALEKEGLKDKKSPLNLSPELQDEIGTAFSLFKTDEDITGRLKDRVQPEILEALLKHISFDKFVQISLKALRRIVPLMEQGKRYNEACAEIYGDHYGKKNTEEKIYLPPIPADEIRNPVVLRALSQARKVINGVVRRYGSPARIHIETAREVGKSFKDRKEIEKRQEENRKDREKAAAKFQEYFPNFVGEPKSKDILKLRLYEQQHGKCLYSGKEINLGRLNEKGYVEIDHALPFSRTWDDSFNNKVLVLGSENQNKGNQTPYEYFNGKDNSREWQEFKARVETSRFPRSKKQRILLQKFDEDGFKERNLNDTRYVNRFLCQFVADRMRLTGKGKKRVFASNGQITNLLRGFWGLRKVRAENDRHHALDAVVVACSTVAMQQKITRFVRYKEMNAFDGKTIDKETGEVLHQKTHFPQPWEFFAQEVMIRVFGKPDGKPEFEEADTPEKLRTLLAEKLSSRPEAVHEYVTPLFVSRAPNRKMSGQGHMETVKSAKRLDEGVSVLRVPLTQLKLKDLEKMVNREREPKLYEALKARLEAHKDDPAKAFAEPFYKYDKAGNRTQQVKAVRVEQVQKTGVWVRNHNGIADNATMVRVDVFEKGDKYYLVPIYSWQVAKGILPDRAVVAYADEEDWTVIDESFRFKFVLYSNDLIKVQLKKDSFLGYFSGLDRATGAISLREHDLEKSKGKDGMHRIGVKTALSFQKYQIDEMGKEIRPCRLKKRPPVR

SEQ ID NO: 567 - protein, 1081 aa, Neisseria meningitidis
MAAFKPNPINYILGLDIGIASVGWAMVEIDEEENPIRLIDLGVRVFERAEVPKTGDSLAMARRLARSVRRLTRRRAHRLLRARRLLKREGVLQAADFDENGLIKSLPNTPWQLRAAALDRKLTPLEWSAVLLHLIKHRGYLSQRKNEGETADKELGALLKGVADNAHALQTGDFRTPAELALNKFEKECGHIRNQRGDYSHTFSRKDLQAELNLLFEKQKEFGNPHVSGGLKEGIETLLMTQRPALSGDAVQKMLGHCTFEPAEPKAAKNTYTAERFIWLTKLNNLRILEQGSERPLTDTERATLMDEPYRKSKLTYAQARKLLSLEDTAFFKGLRYGKDNAEASTLMEMKAYHTISRALEKEGLKDKKSPLNLSPELQDEIGTAFSLFKTDEDITGRLKDRIQPEILEALLKHISFDKFVQISLKALRRIVPLMEQGKRYDEACAEIYGDHYGKKNTEEKIYLPPIPADEIRNPVVLRALSQARKVINGVVRRYGSPARIHIETAREVGKSFKDRKEIEKRQEENRKDREKAAAKFREYFPNFVGEPKSKDILKLRLYEQQHGKCLYSGKEINLGRLNEKGYVEIDHALPFSRTWDDSFNNKVLVLGSENQNKGNQTPYEYFNGKDNSREWQEFKARVETSRFPRSKKQRILLQKFDEDGFKERNLNDTRYVNRFLCQFVADRMRLTGKGKKRVFASNGQITNLLRGFWGLRKVRAENDRHHALDAVVVACSTVAMQQKITRFVRYKEMNAFDGKTIDKETGEVLHQKTHFPQPWEFFAQEVMIRVFGKPDGKPEFEEADTPEKLRTLLAEKLSSRPEAVHEYVTPLFVSRAPNRKMSGQGHMETVKSAKRLDEGVSVLRVPLTQLKLKDLEKMVNREREPKLYEALKARLEAHKDDPAKAFAEPFYKYDKAGNRTQQVKAVRVEQVQKTGVWVRNHNGIADNATMVRVDVFEKGDKYYLVPIYSWQVAKGILPDRAVVAYADEEDWTVIDESFRFKFVLYSNDLIKVQLKKDSFLGYFSGLDRATGAISLREHDLEKSKGKDGMHRIGVKTALSFQKYQIDEMGKEIRPCRLKKRPPVR

SEQ ID NO: 568 - protein, 1082 aa, Neisseria meningitidis
MAAFKPNPINYILGLDIGIASVGWAMVEIDEEENPIRLIDLGVRVFERAEVPKTGDSLAMARRLARSVRRLTRRRAHRLLRARRLLKREGVLQAADFDENGLIKSLPNTPWQLRAAALDRKLTPLEWSAVLLHLIKHRGYLSQRKNEGETADKELGALLKGVADNAHALQTGDFRTPAELALNKFEKECGHIRNQRGDYSHTFSRKDLQAELNLLFEKQKEFGNPHVSGGLKEGIETLLMTQRPALSGDAVQKMLGHCTFEPAEPKAAKNTYTAERFIWLTKLNNLRILEQGSERPLTDTERATLMDEPYRKSKLTYAQARKLLGLEDTAFFKGLRYGKDNAEASTLMEMKAYHAISRALEKEGLKDKKSPLNLSPELQDEIGTAFSLFKTDEDITGRLKDRIQPEILEALLKHISFDKFVQISLKALRRIVPLMEQGKRYDEACAEIYGDHYGKKNTEEKIYLPPIPADEIRNPVVLRALSQARKVINGVVRRYGSPARIHIETAREVGKSFKDRKEIEKRQEENRKDREKAAAKFREYFPNFVGEPKSKDILKLRLYEQQHGKCLYSGKEINLVRLNEKGYVEIDHALPFSRTWDDSFNNKVLVLGSENQNKGNQTPYEYFNGKDNSREWQEFKARVETSRFPRSKKQRILLQKFDEEGFKERNLNDTRYVNRFLCQFVADHILLTGKGKRRVFASNGQITNLLRGFWGLRKVRAENDRHHALDAVVVACSTVAMQQKITRFVRYKEMNAFDGKTIDKETGEVLHQKTHFPQPWEFFAQEVMIRVFGKPDGKPEFEEADTPEKLRTLLAEKLSSRPEAVHEYVTPLFVSRAPNRKMSGQGHMETVKSAKRLDEGVSVLRVPLTQLKLKDLEKMVNREREPKLYEALKARLEAHKDDPAKAFAEPFYKYDKAGNRTQQVKAVRVEQVQKTGVWVRNHNGIADNATMVRVDVFEKGGKYYLVPIYSWQVAKGILPDRAVVQGKDEEDWQLIDDSFNFKFSLHPNDLVEVITKKARMFGYFASCHRGTGNINIRIHDLDHKIGKNGILEGIGVKTALSFQKYQIDELGKEIRPCRLKKRPPVR

SEQ ID NO: 569 - protein, 1081 aa, Neisseria meningitidis
MAAFKPNPINYILGLDIGIASVGWAMVEIDEEENPIRLIDLGVRVFERAEVPKTGDSLAMARRLARSVRRLTRRRAHRLLRARRLLKREGVLQAADFDENGLIKSLPNTPWQLRAAALDRKLTPLEWSAVLLHLIKHRGYLSQRKNEGETADKELGALLKGVADNAHALQTGDFRTPAELALNKFEKESGHIRNQRGDYSHTFSRKDLQAELILLFEKQKEFGNPHVSGGLKEGIETLLMTQRPALSGDAVQKMLGHCTFEPAEPKAAKNTYTAERFIWLTKLNNLRILEQGSERPLTDTERATLMDEPYRKSKLTYAQARKLLGLEDTAFFKGLRYGKDNAEASTLMEMKAYHAISRALEKEGLKDKKSPLNLSPELQDEIGTAFSLFKTDEDITGRLKDRVQPEILEALLKHISFDKFVQISLKALRRIVPLMEQGKRYDEACAEIYGDHYGKKNTEEEIYLPPITADEIRNPVVLRALSQARKVINAVVRRYGSPARIHIETAREVGKSFKDRKEIEKRQEENRKDREKAAAKFREYFPNFVGEPKSKDILKLRLYEQQHGKCLYSGKEINLVRLNEKGYVEIDHALPFSRTWDDSFNNKVLVLGSENQNKGNQTPYEYFNGKENSREWQEFKARVETSRFPRSKKQRILLQKFDEDGFKERNLNDTRYVNRFLCQFVADRMRLTGKGKKRVFASNGQITNLLRGFWGLHKVRAENDRHHALDAVVVACSTIAMQQKITRFVRYKEMNAFDGKTIDKETGEVLHQKAHFPQPWEFFAQEVMIRVFGKPDGKPEFEEADTPEKLRTLLAEKLSSRPEAVHEYVTPLFVSRAPNRKMSGQGHMETVKSAKRLDEGISVLRVPLTQLKLKDLEKMVNRAREPKLYEALKARLEAHKDDPAKAFAEPFYKYDKAGNRTQQVKAVRVEQVQKTGVWVRNHNGIADNATMVRVDVFEKAGKYYLVPIYSWQVAKGILPDRAVVAYADEEDWTVIDESFRFKFVLYSNDLIKVQLKKDSFLGYFSGLDRATGAISLREHDLEKSKGKDGMHRIGVKTALSFQKYQIDEMGKEIRPCRLKKRPPVR

SEQ ID NO: 570 - protein, 1082 aa, Neisseria meningitidis
MAAFKPNPINYILGLDIGIASVGWAMVEIDEEENPIRLIDLGVRVFERAEVPKTGDSLAMARRLARSVRRLTRRRAHRLLRARRLLKREGVLQAADFDENGLIKSLPNTPWQLRAAALDRKLTPLEWSAVLLHLIKHRGYLSQRKNEGETADKELGALLKGVANNAHALQTGDFRTPAELALNKFEKESGHIRNQRGDYSHTFSRKDLQAELILLFEKQKEFGNPHVSGGLKEGIETLLMTQRPALSGDAVQKMLGHCTFEPAEPKAAKNTYTAERFIWLTKLNNLRILEQGSERPLTDTERATLMDEPYRKSKLTYAQARKLLGLEDTAFFKGLRYGKDNAEASTLMEMKAYHAISRALEKEGLKDKKSPLNLSSELQDEIGTAFSLFKTDEDITGRLKDRVQPEILEALLKHISFDKFVQISLKALRRIVPLMEQGKRYDEACAEIYGDHYGKKNTEEKIYLPPIPADKIRNPVVLRALSQARKVINGVVRRYGSPARIHIETAREVGKSFKDRKEIEKRQEENRKDREKAAAKFREYFPNFVGEPKSKDILKLRLYEQQHGKCLYSGKEINLVRLNEKGYVEIDHALPFSRTWDDSFNNKVLVLGSENQNKGNQTPYEYFNGKDNSREWQEFKARVETSRFPRSKKQRILLQKFDEDGFKECNLNDTRYVNRFLCQFVADHILLTGKGKRRVFASNGQITNLLRGFWGLRKVRAENDRHHALDAVVVACSTVAMQQKITRFVRYKEMNAFDGKTIDKETGKVLHQKTHFPQPWEFFAQEVMIRVFGKPDGKPEFEEADTPEKLRTLLAEKLSSRPEAVHEYVTPLFVSRAPNRKMSGAHKDTLRSAKRFVKHNEKISVKRVWLTEIKLADLENMVNYKNGREIELYEALKARLEAYGGNAKQAFDPKDNPFYKKGGQLVKAVRVEKTQESGVLLNKKNAYTIADNGDMVRVDVFCKVDKKGKNQYFIVPIYAWQVAENILPDIDCKGYRIDDSYTFCFSLHKYDLIAFQKDEKSKVEFAYYINCDSSNGRFYLAWHDKGSKEQQFRISTQNLVLIQKYQVNELGKEIRPCRLKKRPPVR

SEQ ID NO: 571 - protein, 1082 aa, Neisseria meningitidis
MAAFKPNPINYILGLDIGIASVGWAMVEIDEEENPIRLIDLGVRVFERAEVPKTGDSLAMARRLARSVRRLTRRRAHRLLRARRLLKREGVLQAADFDENGLIKSLPNTPWQLRAAALDRKLTPLEWSAVLLHLIKHRGYLSQRKNEGETADKELGALLKGVANNAHALQTGDFRTPAELALNKFEKESGHIRNQRGDYSHTFSRKDLQAELILLFEKQKEFGNPHVSGGLKEGIETLLMTQRPALSGDAVQKMLGHCTFEPAEPKAAKNTYTAERFIWLTKLNNLRILEQGSERPLTDTERATLMDEPYRKSKLTYAQARKLLGLEDTAFFKGLRYGKDNAEASTLMEMKAYHAISRALEKEGLKDKKSPLNLSSELQDEIGTAFSLFKTDEDITGRLKDRVQPEILEALLKHISFDKFVQISLKALRRIVPLMEQGKRYDEACAEIYGDHYGKKNTEEKIYLPPIPADEIRNPVVLRALSQARKVINGVVRRYGSPARIHIETAREVGKSFKDRKEIEKRQEENRKDREKAAAKFREYFPNFVGEPKSKDILKLRLYEQQHGKCLYSGKEINLVRLNEKGYVEIDHALPFSRTWDDSFNNKVLVLGSENQNKGNQTPYEYFNGKDNSREWQEFKARVETSRFPRSKKQRILLQKFDEDGFKECNLNDTRYVNRFLCQFVADHILLTGKGKRRVFASNGQITNLLRGFWGLRKVRAENDRHHALDAVVVACSTVAMQQKITRFVRYKEMNAFDGKTIDKETGKVLHQKTHFPQPWEFFAQEVMIRVFGKPDGKPEFEEADTPEKLRTLLAEKLSSRPEAVHEYVTPLFVSRAPNRKMSGAHKDTLRSAKRFVKHNEKISVKRVWLTEIKLADLENMVNYKNGREIELYEALKARLEAYGGNAKQAFDPKDNPFYKKGGQLVKAVRVEKTQESGVLLNKKNAYTIADNGDMVRVDVFCKVDKKGKNQYFIVPIYAWQVAENILPDIDCKGYRIDDSYTFCFSLHKYDLIAFQKDEKSKVEFAYYINCDSSNGRFYLAWHDKGSKEQQFRISTQNLVLIQKYQVNELGKEIRPCRLKKRPPVR

SEQ ID NO: 572 - protein, 1082 aa, Neisseria meningitidis
MAAFKPNPINYILGLDIGIASVGWAMVEIDEEENPIRLIDLGVRVFERAEVPKTGDSLAMARRLARSVRRLTRRRAHRLLRTRRLLKREGVLQAANFDENGLIKSLPNTLWQLRAAALDRKLTPLEWSAVLLHLIKHRGYLSQRKNEGETADKELGALLKGVAGNAHALQTGDFRTPAELALNKFEKESGHIRNQRGDYSHTFSRKDLQAELNLLFEKQKEFGNPHISDGLKEGIETLLMTQRPALSGDAVQKMLGHCTFEPTEPKAAKNTYTTERFIWLTKLNNLRILEQGSERPLTDTERATLMDEPYRKSKLTYAQARKLLELDDIAFFKGLRYGKDNAEASTLMEMKAYHAISRALEKEGLKDKKSPLNLSPELQDEIGTAFSLFKTDEDITGRLKDRIQPEILEALLKHINFDKFVQISLKALRRIVPLMEQGKRYDEACAEIYGDHYGKKNTEEKIDLPPIPADEIHNPVVLRALSQARKVINGVVRRYGSPARIHIETAREVGKSFKDRKEIEKRQEENRKDREKAAAKFREYFPNFVGEPKSKDILKLRLYEQQHGKCLYSGKEINLGRLNEKGYVEIDHALPFSRTWDDSFNNKVLVLGSENQNKGNQTPYEYFNGKDNSREWQEFKARVETSRFPRSKKQRILLQKFDEDGFKERNLNDTRYVNRFLCQFVADRMRLTGKGKKRVFASNGQITNLLRGFWGLRKVRAENDRHHALDAVVVACSTVAMQQKITRFVRYKEMNAFDGKTIDKETGEVLHQKTHFPQPWEFFAQEVMIRVFGKPDGKPEFEEADTPEKLRTLLTEKLSSRPEAVHEYVTPLFVSRAPNRKMSGQGHMETVKSAKRLDEGISVLRVPLTQLKLKDLEKMVNREREPKLYEALKARLEAHKDDPAKAFAEPFYKYDKAGNRTQQVKAMRVEQVQKTGVWVRNHNGIADNATMVRVDVFEKGDKYYLVPIYSWQVAKGILPDRAVVQGKDEEDWQLIDDSFNFKFSLHPNDLVEVITKKARMFGYFASCHRGTGNINIRIHDLDHKIGKNGILEGIGVKTALSFQKYQIDELGKEIRPCRLKKRPPVR

SEQ ID NO: 573 - protein, 1082 aa, Neisseria meningitidis
MAAFKPNPINYILGLDIGIASVGWAMVEIDEEENPIRLIDLSVRVFERAEVPKTGDSLAMARRLARSVRRLTRRRAHRLLRARRLLKREGVLQAADFDENGLIKSLPNTPWQLRAAALDRKLTPLEWSAVLLHLIKHRGYLSQRKNEGETADKELGALLKGVADNAHALQTGDFRTPAELALNKFEKESGHIRNQRGDYSHTFSRKDLQAELILLFEKQKEFGNPHVSGGLKEGIETLLMTQRPALSGDAVQKMLGHCTFEPAEPKAAKNTYTAERFVWLTKLNNLRILEQGSERPLTDTERATLMDEPYRKSKLTYAQARKLLGLEDTAFFKGLRYGKDNAEASTLMEMKAYHAISRALEKEGLKDKKSPLRLSPELQDEIGTAFSLFKTDEDITGRLKDRVQPEILEALLKHISFDKFVQISLKALRRIVPLMEQGKRYDEACAEIYGDHYGKKNAEEKIYLPPIPADEIRNPVVLRALSQARKVINGVVRRYGSPARIHIETAREVGKSFKDRKEIEKRQEENRKDREKAAAKFREYFPNFVGEPKSKDILKLRLYEQQHGKCLYSGKEINLGRLNEKGYVEIDHALPFSRTWDDSFNNKVLVLGSENQNKGNQTPYEYFNGKDNSREWQEFKARVETSRFPRSKKQRILLQKFDEDGFKERNLNDTRYVNRFLCQFVADRMRLTGKGKKRVFASNGQITNLLRGFWGLRKVRAENDRHHALDAVVVACSTVAMQQKITRFVRYKEMNAFDGKTIDKETGEVLHQKTHFPQPWEFFAQEVMIRVFGKPDGKPEFEEADTPEKLRTLLAEKLSSRPEAVHEYVTPLFVSRAPNRKMSGQGHMETVKSAKRLDEGVSVLRVPLTQLKLKDLEKMVNREREPKLYEALKARLEAHKDDPAKAFAEPFYKYDKAGNRTQQVKAVRVEQVQKTGVWVRNHNGIADNATMVRVDVFEKGDKYYLVPIYSWQVAKGILPDRAVVQGKDEEDWQLIDDSFNFKFSLHPNDLVEVITKKARMFGYFASCHRGTGNINIRIHDLDHKIGKNGILEGIGVKTALSFQKYQIDELGKEIRPCRLKKRPPVR

SEQ ID NO: 574 - protein, 1082 aa, Neisseria meningitidis
MAAFKPNSINYILGLDIGIASVGWAMVEIDEEENPIRLIDLGVRVFERAEVPKTGDSLAMARRLARSVRRLTRRRAHRLLRTRRLLKREGVLQAANFDENGLIKSLPNTPWQLRAAALDRKLTPLEWSAVLLHLIKHRGYLSQRKNEGETADKELGALLKGVAGNAHALQTGDFRTPAELALNKFEKESGHIRNQRSDYSHTFSRKDLQAELILLFEKQKEFGNPHVSGGLKEGIETLLMTQRPALSGDAVQKMLGHCTFEPAEPKAAKNTYTAERFIWLTKLNNLRILEQGSERPLTDTERATLMDEPYRKSKLTYAQARKLLGLEDTAFFKGLRYGKDNAEASTLMEMKAYHAISRALEKEGLKDKKSPLNLSPELQDEIGTAFSLFKTDEDITGRLKDRIQPEILEALLKHISFDKFVQISLKALRRIVPLMEQGKRYDEACAEIYGDHYGKKNTEEKIYLPPIPADEIRNPVVLRALSQARKVINGVVRRYGSPARIHIETAREVGKSFKDRKEIEKRQEENRKDREKAAAKFREYFPNFVGEPKSKDILKLRLYEQQHGKCLYSGKEINLGRLNEKGYVEIDHALPFSRTWDDSFNNKVLVLGSENQNKGNQTPYEYFNGKDNSREWQEFKARVETSRFPRSKKQRILLQKFDEDGFKERNLNDTRYVNRFLCQFVADRMRLTGKGKKRVFASNGQITNLLRGFWGLRKVRAENDRHHALDAVVVACSTVAMQQKITRFVRYKEMNAFDGKTIDKETGEVLHQKTHFPQPWEFFAQEVMIRVFGKPDGKPEFEEADTLEKLRTLLAEKLSSRPEAVHEYVTPLFVSRAPNRKMSGQGHMETVKSAKRLDEGVSVLRVPLTQLKLKDLEKMVNREREPKLYEALKARLEAHKDDPAKAFAEPFYKYDKAGNRTQQVKAVRVEQVQKTGVWVRNHNGIADNATMVRVDVFEKGDKYYLVPIYSWQVAKGILPDRAVVQGKDEEDWQLIDDSFNFKFSLHPNDLVEVITKKARMFGYFASCHRGTGNINIRIHDLDHKIGKNGILEGIGVKTALSFQKYQIDELGKEIRPCRLKKRPPVR

SEQ ID NO: 575 - protein, 67 aa, Neisseria meningitidis
MFGYFASCHRGTGNINIRIHDLDHKIGKNGILEGIGVKTALSFQKYQIDELGKEIRPCRLKKRPPVR

SEQ ID NO: 576 - protein, 220 aa, Neisseria mucosa
MRHIFSDGLKEGIETLLMTQRPALSGDAVQKMLGHCTFEPTEPKAAKNTYTAERFIWLTKLNNLRILEQGSERPLTNTERATLMDEPYRKSKLTYAQARKLLGLKDTAFFKGLRYGKDNAEASTLMEMKAYHAISRALEKEGLKDKKSPLNLSPELQDEIGTAFSLFKTDEDITGRLKTELTPASNKTLSRPFTVKSASNGSTSAPWLPSTKWFLHFKPA

SEQ ID NO: 577 - protein, 392 aa, Neisseria sp.
MAPFTLKPLNYILGLDIGIASVGWAVVETDSDVLPYRLIDVGVRTFDRAEVPKTGESPAAARRLARSVRRMIRRRAHRMLRARRLLKREGMLQAADFDAHGLVENLPVNPWQLRVDALSRKLMPLEWAAVLLHMVKHRGYLSQRKNERNSSDKELGALLSGVAANSEALQGGDFRTPAELAVNKFEKESGHIRNQRGDYSHTFNRKDVQAELVLLFEKQKEYGNPYISDGLLTGVEDLLMTQRAALSGDAVQKMLGRCTFEPEEYKAAKNTYSAERFVWLTKLNNLRILDQGSERPLTDSERAKLMDEPYKKTKLTYAQVRRLLELDDTAFFKGLRYSKDNAESATLMEMKAYHSISGALEKAGLKNKKIAAGLIARIAGRNRRGVFAIQNR

SEQ ID NO: 578 - protein, 701 aa, Neisseria sp.
MQDEIGEAFSLFKTDEDIRGRLKGKLPDEQLDALLEYVSFDKFVQLSLKALRKILPLMEQGKRYDEACAEIYGDHYGIKDDKQAQFLPPVSADEIRNPVVLRALSQARKVVNAVVRRYGSPARVHIETAREVGKSFLDRKKIEKRQEENRKDRERSIAKFREYFPNFVGEPKAKDILKMRLYEQQQGQCLYSGKAIDLRRLNEKGYVEIDHALPFSRTWDDSFNNKVLVLAGENQNKRNQTPFEWLGGDEKRWREFTARVEHCRFPRSKKQRILMQKLDEKDFKERNLNDTRYVNRFLCNFIAQNMLLTGEDKNRVFASNGQITNLLRGMWGLKKVRESNDRHHALDAVVVACSTVAMQQKITNYVRQKEMNVFDGEMVDKTTGEVSRLHFPQPWDFFRQEVMMRVFGKPDTPSENNEEADTPEKLRALLADKLSSRPEAVHEAVTPLFVSRAPSRKMSGQGHMETIKSAKRLSEGKSVLRVPLTQLTPKLLENMVNREREPQLYEDLLGRLNAHGGDPAKAFAAPFFKRDKAGNPTQQVKAVRVEDVQKSGVIVREGNGVADNATMVRVDVFEKGGKYYLMPIYTWQAAKGILPNKAVIAHTDEANWQEMDTSFTFKFALYPNDLVLASLKKETYFGYFAGLDRSTGNISLRVHDLEKSKGKDGVYRIGVKTALSFQKYQVDELGKTIRPCRLKKRPPVR

SEQ ID NO: 579 - protein, 1089 aa, Neisseria sp.
MTAFKPNPLNYILGLDIGIASVGWAMVEIDDKENPVRLIDLGVRVFERAEMPKTGDSLAAARRLARSVRRLTRRRAHRLLRARRLLKHEGVLKPEDFDENGLVKPLPYIPKQPRNTPWQLRAAALDRKLTPLEWAAVLLHLVKHRGYLSQRKNEGETDDKELGALLKGVADNTHALQAGNFRTPAELALNKFEKESGHIRNQRGDYSHTFSRKDLQAELVLLFEKQKEFGNPYVSDDLKNGIENLLMTQRPALSGDAIQKMLGHCTFEPAEPKAAKNTYTAERFIWLTKLNNLRILNQGNERPLTDAERTTLMDEPYKKSKLTYAQARKLLDLDDTAFFKGLRYGKDNAESATLMEMKAYHAISRALEKEGLKDKKSPLSLSPELQDEIGTAFSLFKTDEEITGRLKGCLQPEILDALLKHISFDKFVQISLKALRRIVPLMEQGKRYDEACAEIYGDHHGRRNSEETLYLPPIPADEIRNPVVLRALSQARKVINGVGRRYGSPARIHIETAREVGKSFKDRKEIEKRQEENRKDREKAAAEFQEYFPNFVGEPKSKDILKLRLYRQQNCKCLYSGKEINLGRLNEKGYVEIDHALPFSRTWDDSFNNKVLVLGSENQNKGNRTPYEYLNGKDNSREWQEFKARVETSRFPHSKKQRILLQKFDEEGFKERNLNDTRYVNRFLCKFVADHMQLTGKGKRRVFASNGQITNLLRGFWGLRKVRAENDRHHALDAVVVACSTVAMQQRITRFVRYKEMNAFDGKTVDKETGEVLHQKTHFPQPWEFFAQEVMIRVFGKPDGKPELEEADTPEKLRALLAEKLSSRPEAVHEYVAPLFVSRAPNRKMSGQGHMETIKSPKRLDEGISVVRVPLTQLKLKDLEKMVNREREPKLYEALKARLEAHKDDPAKAFAEPFYKQDKAGNRTQQVKAVRIEQVQKTGVWVRNQNGIADNATMVRVDVFEKGGKYYLVPIYSWQVAKGILPDKAIIAFKDEEEWQLIDDSFNFKFPLHPNDLVEVITKKARIFGYFASCHRGTGNINIRIHDLDNKVGKNGILEGIGVKTALSFQKYQIDELGKEIRPCRLKKRPPVR

SEQ ID NO: 580 - protein, 1097 aa, Neisseria wadsworthii
MKKQPQRYILGLDLGIASVGWALILVDGAENPVGLLDCGVRTFERAEVPKTGDSLALARRQARSVRRLIRRRAHRLLRLRRLLKREGILSAADFNSDGLPNLPIDAWQLRVAGLERKLTNQEWAAVLLHLVKHRGYLSQRKSETQTENKELGRLLAGVAENSKLLSESSEQYRTPAELAVKLFAEQSGHLRNKGGEYTHTFNRLDLQKELHLLFERQYALGNPFASAELQSKVDELLMTQRSALQGEAVLKMLGKCTFEPSEYKAAKNTYSAERFIWLTKLNNLRILYNGEERALDEGDRKKLLDEPYKKAKLTYKQVRSILNLPESAVFKGLRYGKDSDGLKAENGTLMEMKAYHKIRTILDKAGLKGEWENRIRNPEILDKIGTAFSLYKTDEDIQAALADLRLPENVLDALLAGLNFDKFIQLSLKALRNILPLMERGIRYDEACKEVYGDHRALAESKNQVLLPPIPADEIRNPVVLRTLTQARKVINAIIRRYGSPQRVHIETARELGKSKQERDKIDRKNKENQNDRNRLASDIRKHFNFEPTPKDILKLRLYEQQHGKCLYSDLREEKGECLYTGNVIELHRLFEDGYVEIDHALPLSRTWDNSLNNKVLVLKSSNQNKGNKTPYEWLDGANNSRRWREFQARVQGCHFPYVKKQRIQTAKLDSKAEQGFLERNLNDTRYISKFMCQFITANLRLAETSNALMEEVAGENPYWKERKRQRVFAPSGSIIALLRGLWGLKKVREDNDRHHALDAIVVACSTVSMQQKITKAMQRRETLETVDSETGEVKTRIPQPWDFFRQEVMIRVFSDSPREELAEKLNSRPEALHDFVSPLFVSRAPNRKMTGQGHLETVKSAKRLSENISVVRKPLTALKLKDIENIVGYPDREPALYQALRERLLAHKDDPVKAFADKPFYKPAKDGGQGSLVKAVRIIENTKHGLKIRNGITDTNGDMVRTDVYQKTDKKGKRQYFIVPVYAWQVEKNELPTVDCKGYEIDDNYEFCFSLYKYDLIEIQNPNDINQELRAYYINCDSSDGRFWLAYHDKSAKEQQFRISTQNQPIIKKYQVDTLGKEIRLCKAEKRTALNGKKKK

SEQ ID NO: 581 - protein, 1426 aa, Niabella soli
MPRKNILGLDLGTTSIGFAKIIEDDDYQCSSVELIGVRVNPLTTDEQTNFEKGKPVSVNADRTLKRGMRRNLDRYQLRRDYLIEILRTHHIITADTKLAEDGKNTTHTTYALRALAATAEIPLEAFVRVLLAINKKRGYKSSRKAKNEDEGQLIDGMAIARRLYEESLTPGQFSYQLLKEGKKYLPDFYRSDLNTELNKVWNFQKQFYPEILTDEFKRHLEGKGQRATAVAFWGQHGFSMAENKGSREEKKLHAYKWRSEAAHKQLTKEEVAFVITEINNDLNKSSGYLGAISDRSKELFFNKQTVGQYLHQQLKENPHTRLKGQVFYRQDYLDEFETIWEMQAKFYSALTLELKEEVRDVVIFYQRKLKSQMGLISLCEFESKEIEIEKNGEKAKKRIGLRVAPKSSPLFQEFKIWQVLNNLEFRNKKTKEVFVPEMAAKQQLFDELNIKGNLLASEAIKILGYKTKDWEANYHTLEGNRTNKSLYDAWLKILELEGYDENLLKLSGSDDIDVSKIEKPALEIRQMVLAVFEVLGISGAILDFDAEADGKAFEQQPAYQLWHLLYSAEDDGKKYSQEDIFTYGHDNIGLKKKLCEKFGFRPEHTKILVNVVFSDDYGNLSSKAMRRIYPFIKELTYDKACAEAGYRHSAASLTKEEIAARPLQNRLDLLKKNELRSPVVEKILNQMVNVVNTLVDDENQNRKARGLSEDFHFDEIRIELARELKKNAKERAEMTTNINTAKQSHEKIIRILQTEFGVPNPSRNDIVRYKLYEELKNNGYKDLYTNTYISRDILFSKQIDVDHIIPQMSLFDDSFSNKTVVFRKDNQDKGNKTAYDYILGKYGEQALEEYISRITSLFELGKKNKEEGIGKAKFQKLQKRLVDIGDGFIERDLRESQYIAKKANNMLYAICRSVVSTSGEITARLREDWDLVNVMQEINLPKFRALGLTEMVEKKDGAQKERITDWTKRNDHRHHAMDALAIAFTRHSHIQYLNHLNARKDEANKWHPVVSKIEEKETVLIYDDLGNRKRKFKAPMPNFREVVKEHLENVLISHKAKNKVVTKNKNKIKTVRGEKVKTELTPRGQLHKETIYGRYRYYESKEEKIGPKFDAEMIGMVTNPQYKKLLLERLAANGNDPKKAFWGKNALNKNPLYVDEARQELLPEKILLRWLNDDYSIRKDVTPENLKDIKTIEKILDKGVKKILLKRLADFGNDPKKAFSDLDKNPIWQNEAKRIAIKRVTISGIKNAAPLHHKKDHLGNDILDEKGKQIPSSFVSTGNNHHVAIYRDAEGNLQERVVSLFDAVQLVNGGEPVIDKEYNKGIGWQFLFTMKQNEMFVFPDEKTGFNPREVDLLSSGNRKLISPNLFRVQKLASKNYFFRHHLETSVEEKKELKNIAYKPQLGLNALSNIVKVRINHIGEIVSVGEY

SEQ ID NO: 582 - protein, 79 aa, Nitritalea halalkaliphila
MPLRLPERVYKMISSTGAECHFLPVNVSSLIKGYDAKSKLGEFGSQNKQEVTSDSFIRVKERCYKLEINRLGIPLNRLK

SEQ ID NO: 583 - protein, 1498 aa, Odoribacter laneus
METTLGIDLGTNSIGLALVDQEEHQILYSGVRIFPEGINKDTIGLGEKEESRNATRRAKRQMRRQYFRKKLRKAKLLELLIAYDMCPLKPEDVRRWKNWDKQQKSTVRQFPDTPAFREWLKQNPYELRKQAVTEDVTRPELGRILYQMIQRRGFLSSRKGKEEGKIFTGKDRMVGIDETRKNLQKQTLGAYLYDIAPKNGEKYRFRTERVRARYTLRDMYIREFEIIWQRQAGHLGLAHEQATRKKNIFLEGSATNVRNSKLITHLQAKYGRGHVLIEDTRITVTFQLPLKEVLGGKIEIEEEQLKFKSNESVLFWQRPLRSQKSLLSKCVFEGRNFYDPVHQKWIIAGPTPAPLSHPEFEEFRAYQFINNIIYGKNEHLTAIQREAVFELMCTESKDFNFEKIPKHLKLFEKFNFDDTTKVPACTTISQLRKLFPHPVWEEKREEIWHCFYFYDDNTLLFEKLQKDYALQTNDLEKIKKIRLSESYGNVSLKAIRRINPYLKKGYAYSTAVLLGGIRNSFGKRFEYFKEYEPEIEKAVCRILKEKNAEGEVIRKIKDYLVHNRFGFAKNDRAFQKLYHHSQAITTQAQKERLPETGNLRNPIVQQGLNELRRTVNKLLATCREKYGPSFKFDHIHVEMGRELRSSKTEREKQSRQIRENEKKNEAAKVKLAEYGLKAYRDNIQKYLLYKEIEEKGGTVCCPYTGKTLNISHTLGSDNSVQIEHIIPYSISLDDSLANKTLCDATFNREKGELTPYDFYQKDPSPEKWGASSWEEIEDRAFRLLPYAKAQRFIRRKPQESNEFISRQLNDTRYISKKAVEYLSAICSDVKAFPGQLTAELRHLWGLNNILQSAPDITFPLPVSATENHREYYVITNEQNEVIRLFPKQGETPRTEKGELLLTGEVERKVFRCKGMQEFQTDVSDGKYWRRIKLSSSVTWSPLFAPKPISADGQIVLKGRIEKGVFVCNQLKQKLKTGLPDGSYWISLPVISQTFKEGESVNNSKLTSQQVQLFGRVREGIFRCHNYQCPASGADGNFWCTLDTDTAQPAFTPIKNAPPGVGGGQIILTGDVDDKGIFHADDDLHYELPASLPKGKYYGIFTVESCDPTLIPIELSAPKTSKGENLIEGNIWVDEHTGEVRFDPKKNREDQRHHAIDAIVIALSSQSLFQRLSTYNARRENKKRGLDSTEHFPSPWPGFAQDVRQSVVPLLVSYKQNPKTLCKISKTLYKDGKKIHSCGNAVRGQLHKETVYGQRTAPGATEKSYHIRKDIRELKTSKHIGKVVDITIRQMLLKHLQENYHIDITQEFNIPSNAFFKEGVYRIFLPNKHGEPVPIKKIRMKEELGNAERLKDNINQYVNPRNNHHVMIYQDADGNLKEEIVSFWSVIERQNQGQPIYQLPREGRNIVSILQINDTFLIGLKEEEPEVYRNDLSTLSKHLYRVQKLSGMYYTFRHHLASTLNNEREEFRIQSLEAWKRANPVKVQIDEIGRITFLNGPLC

SEQ ID NO: 584 - protein, 1389 aa, Oenococcus kitaharae; identical to SEQ ID NO: 241

SEQ ID NO: 585 - protein, 1535 aa, Ornithobacterium rhinotracheale
MNTILGLDLGTNSIGWALIKVLNDKTRLPLEIIDLGVVVIPTDQRTLDKFSKGESISKTAERTKQKGVRKLYERKKLRRERLHRVLNILGFLPEHYSKKIDFKKHLGQFFGNSQPKISYVENDHGKHEFIFMDSYREMLKEFSKHNIKNVPYDWTIYYLRKKALSQKISKEELAWVILNFNKKRGYYQFRDDNADENKENKIEKYYALKVTNVKKEDAQNYTITLENGWIYKNKSKISLLDWVGSTKEFISTEKFDNKGNIIKKKNGEDDRTLKLVDSEKDWIAIKKSTEDRIENYGKTVGTYLYEHLLKDPNQKLNGELINIIDRKFYKNELKQILEKQKEFHPELLNEDLFQKSIIELYPKNSTRQKELKNKDLCYLLIDDVIYYQRDLKKKNSTINKCSFESREYYLNGEKQIQKINCIAKSKPLYQEFRTLQFIKNLKVYEIIDGLEKDITSKLLPDFETKEHFFEWLNDKEKIDQLQLLSYKCFDLHDNVKNDLIAKGIKRPTEKAIRTELLEKYRWNYSKDNDRNFLLNETRFKILKYLKKVDKKLTLTNEQIESLWLLLYSAKDERELKNGLQKFSEKNKLPKKFSDIFISFPPFKKEYGAYSEKALKKLLSLVRFGKYWSFNKIDNNIQNKIMNILNGEVDDSISDRVREKTILLQDKNDFQDLPLWLASYVAYNRFSEVSEIKYWDSPDKIEFLKQHSIGNPIVEKIINETLKLIKDIWVIHGKSCKNFFSEIHIELSREIKSSSKKRAQITNNNTKNQKLNNLIKSLLIEMASDTKYENVTPYSPSQQEILKIYDEGIYSKEENSEKIKEINKIRNNNKISKSDITKYKLWLEQGYISPYTGKIIPLTKLFTAKYQKEHIIPQTKFFDDSFNNKVICEAEVNKLKDNSLAMNFIKAKGGKAVKLSDGETVTILNQEEYKQLVRTSFKKNSIKLRNLLLEEIPDTFTKRQLNDTKYISKLVLSLLSNIVREKGELESTAKRIVSTNGQITSILRNDWGLNNIWNKLITPRFERLNNINKNKIYGNWENKKGKNVFQINYLNDNLSTLNTKRIDHRHHALDALIVACTTRNHINFLNNQYAKSRNQRHDLRAKLKRRETITTEGSKKQVFKDFIKPWESFTQDALKKLETTIVNFKVNKRIINKTINWYKKWEKQKDGTYKKIQKKQTKGDAWAIRKPLHIDTIYGIVCKKLPLKSALENYKNIIDENLKHKIKELKEVNKFDNNQIINFFKECNFIFEDNNIQKVEVYDFKDNRDKTILSSSRQLIDESFTPKKIGKVLDPTIRNILLKHLNSTKYNNKFDSDGNPIKPEKLAFSPEGLKDLNKNIKHLNNNKEHQPIKRVKLFETLGNKIKVGYTQQKNKKFAETATGTNLFLGIYSDNNKRDFKTIPLILAIQREKEGLNPCPDTDEKGNQLLFSLSPNELVFVPNNEERKNPNLVDFENLSKDQIDRIYKFVSCTGSEAYFVPSRTAKPIIENENGTNNKSQRIIEFNEKTSIKNEKNEPVLIKTICWKIEVNRLGKIIKVIK

SEQ ID NO: 586 - protein, 103 aa, Parabacteroides merdae
MIVYRLFYRFLFKATKLVNFVIHKELKRQIARTGKIKFHSGGCGCQSGNYKMQNFEKGKSITTNADRTLKRSMRRNLYRCKLRRDVLIELLKKVGFIPEKQWK

SEQ ID NO: 587 - protein, 82 aa, Parabacteroides merdae
MSIWKLQYPPLDLKIYNKFLVYSRVNPLTVDEMQNFEKGKSITTNADRTLKRSMRRNLQRYKLRRDVLIELLKKVGFMSEKQ

SEQ ID NO: 588 - protein, 84 aa, Parabacteroides merdae
MSIWKLQYPPLDLKIYNKFLVYSRVNPLTVDEMQNFEKGKSITTNADRTLKRSMRRNLYRCKLRRDVLIELLKKVGFIPEKQWK

SEQ ID NO: 589 - protein, 398 aa, Pasteurella bettyae
MLANENQNKGNLTPYEWLDGKNNSKRWQDFVARVQTCCFSHRKKQHILSHKLDEKSFIERNLNDTRYVARFLCNFIADNMLLTGKGKRKVFASNGQITALLRGRWGLQKVRDDNDRHHALDAVVIACSTVAMQQKITRFVKYEEGNVFSGERIDRETGEIIPLYFPTPWKFFKENVEIRIFSENPKLELENRLPDYPQYNHEFVQPLFVSRMPTRKMTGQGHMETIKSAKRLDEGISVLKVPLTQLKLADLENMVNRERELALYEALKERLELFGNDPAKAFIEPFYKKGGALVKAVRVKKVQKSGVLVRDGNGVADNALMVRVDVFTKGGKYFLVPIYTWQVAKGILPNKAVTANIDEIDWLEMDESYQFIFTMYPNDLVKVKLKKEEFFGYYGGLD

SEQ ID NO: 590 - protein, 610 aa, Pasteurella bettyae
MNMLKPLNYILGLDLGIGSVGWAVVEIDEQGNPLRLIDVGVRTFERAEVAKTGESLALARRLARSSRRLVKRRAARIKKAKRLLKAENILLSVDEILPNDVWQLRVKGLDHKLERQEWAAVLLHLLKRRGYLSQRKNESKSENKELGALLSGVVTNHQILQTDEYRTPAEIAVHKFQAEDGHIRNQRGDYTHTFSRLDLLAEMELLFQRQTELGNLHTSSKLLENLTALLMWQKPALAGEAILKMLGKCTFEPTEYKAAKNSYSAERFVWLTKLNNLRILEQGAERALTDSERFVLLDQPYEKAKLTYAQVRTLLKLSDEAIFKGVRYQGEDKKTVESKTTLMEMKAYHQIRKALDGADLKDEWNTLKNDSALLDEIGTAFSLYKTDDDISHYLGGKLSEKVLNVLLENLNFDKFIQLSLKALQKILPLMLQGQRYDEAVSAVYGDHYGKKSAESCRLLPAIPANEIHNPVVLRTLTQARKVINAVVRLYGSPARIHIETGRKVGKSYQDRKKLEKQQEENREQRESAVKKFKEYFPNFVGEPKGKDILKLRLYELQQSKCLYSGKSFDPNRLLEKGYVEVDHALPFSRTWDDSFNNKVCLPMKTRIKAI

SEQ ID NO: 591 - protein, 199 aa, Pasteurella multocida
MACATPSMQQKITRFIRFKEVHPYKIENRYEMVDQESGEIISPHFPEPWAYFRQEVNIRVFDNHPDTVLKEMLPDRPQANHQFVQPLFVSRAPTRKMSGQGHMETIKSAKRLAEGISVLRIPLTQLKPNLLENMVNKEREPALYAGLKARLAEFNQDPAKAFTTPFYKQGGQQVKAIRVEQVQKSGVLVRENNGVADNA

SEQ ID NO: 592 - protein, 63 aa, Pasteurella multocida
MQTTNLSYILGLDLGIASVGWAVVEINENEDPIGLIDVGVRIFERAEVPKTGESLALSRRLAR

SEQ ID NO: 593 - protein, 1058 aa, Pasteurella multocida
MQTTNLSYILGLDLGIASVGWAVVEINENEDPIGLIDVGVRIFERAEVPKTGESLALSRRLARSTRRLIRRRAHRLLLAKRFLKREGILSTTDLEKGLPNQAWELRVAGLERRLSAIEWGAVLLHLIKHRGYLSKRKNESQTNNKELGALLSGVAQNHQLLQSDDYRTPAELALKKFAKEEGHIRNQRGAYTHTFNRLDLLAELNLLFAQQHQFGNPHCKEHIQQYMTELLMWQKPALSGEAILKMLGKCTHEKNEFKAAKHTYSAERFVWLTKLNNLRILEDGAERALNEEERQLLINHPYEKSKLTYAQVRKLLGLSEQAIFKHLRYSKESAESATFMELKAWHAIRKALENQGLKDTWQDLAKKPDLLDEIGTAFSLYKTDEDIQQYLEGKLPDSVINALLVSLNFDKFIELSLKSLRKILPLMEQGKRYDQACHEIYGHHYGEKNQQISQLLPVIPTQEIRNPVVLRTLSQARKVINAIIRQYGSPARVHIETGRELGKSFKERREIQKQQEDNRTKRESAVQKFKELFSDFSSEPKSKDILKFRLYEQQHGKCLYSGKEINIHRLNEKGYVEIDHALPFSRTWDDSFNNKVLVLASENQNKGNQTPYEWLQGKINSERWKNFVALVLGSQCSAAKKQRLLTQVIDDNKFIDRNLNDTRYIARFLSNYIQENLLLVGKNKKNVFTPNGQITALLRSRWGLIKVRENNDRHHALDAIVVACATPSMQQKITRFIRFKEVHPYKIENRYEMVDQESGEIISPHFPEPWAYFRQEVNIRVFDNHPDTVLKEMLPDRPQANHQFVQPLFVSRAPTRKMSGQGHMETIKSAKRLAEGISVLRIPLTQLKPNLLENMVNKEREPALYVGLKARLAEFNQDPAKAFATPFYKQGGQQVKAIRVELVQKSGVLVRQGNGVADNAPGSIVRTDVFIKNNKFFLVPIYTWQVAKGILPNKAIVAHKNEDEWEEMDEGAKFKFSIFPNDLIELRTKTECFLGYYIGPDRHNGSISLREHDSEISKGNAGVYRVGVKLALSLEKYHIDELGKNRRICRPHQRRPVR

SEQ ID NO: 594 - protein, 1056 aa, Pasteurella multocida
MQTTNLSYILGLDLGIASVGWAVVEINENEDPIGLIDVGVRIFERAEVPKTGESLALSRRLARSTRRLIRRRARRLLLAKRFLKREGILSTTDLEKGLPNQAWELRVAGLERRLSAIEWGAVLLHLIKHRGYLSKRKNESQTNNKELGALLSGVAQNHQLLQSDDYRTPAELALKKFAKEEGHIRNQRGAYTHTFNRLDLLAELNLLFAQQHQFGNPHCKEHIQQYMTELLMWQKPALSGEAILKMLGKCTHEKNEFKAAKHTYSAERFVWLTKLNNLRILEDGAERALNEEERQLLINHPYEKSKLTYAQVRKLLGLSEQAIFKHLRYSKENAESATFMELKAWHAIRKALENQGLKDTWQDLAKKPDLLDEIGTAFSLYKTDEDIQQYLTNKVPNSVINALLVFLNFDKFIELALKSLRKILPLMEQGKRYDQACREIYGHHYGEANQKTSQLLPAIPAQEIRNPVVLRTLSQARKVINAIIRQYGSPARVHIETGRELGKSFKERREIQKQQEDNRTKRESAVQKFKELFSDFSSEPKSKDILKFRLYEQQHGKCLYSGKEINIHRLNEKGYVEIDHALPFSRTWDDSFNNKVLVLASENQNKGNQTPYEWLQGKINSERWKNFVALVLGSQCSAAKKQRLLTQVIDDNKFIDRNLNDTRYIARFLSNYIQENLLLVGKNKKNVFTPNGQITALLRSRWGLIKIRENNDRHHALDAIVVACATPSMQQKITRFIRFKEVHPYKIENRYEMVDQESGEIISPHFPEPWAYFRQEVNIRVFDNHPDTVLKEMLPDRPQANHQFVQPLFVSRAPTRKMSGQGHMETIKSAKRLAEGISVLRIPLTQLKPNLLENMVNKEREPALYAGLKARLAEFNQDPAKAFTTPFYKQGGQQVKAIRVEQVQKSGVLVRENNGVADNASIVRTDVFIKNNKFFLVPIYTWQVAKGILPNKAIVAHKNEDEWEEMDEGAKFKFSLFPNDLVELKTKKEYFFGYYIGLDRATGNISLKEHDGEISKGKDGVYRVGVKLALSFEKYQVDELGKNRQICRPQQRQPVR

SEQ ID NO: 595 - protein, 134 aa, Pasteurella multocida
MVNKEREPALYAGLKARLAEFNQDPAKAFTTPFYKQGGQQVKAIRVEQVQKSGVLVRENNGVADNASIVRTDVFIKNNKFFLVPIYTWQVAKGILPNKAIVAHKNEDEWEEMDEGAKFKFSLFPNDLVELKTKK

SEQ ID NO: 596 - protein, 53 aa, Pasteurella multocida
YSKENAESATFMELKAWHAIRKALENQGLKDTWQDLAKKPDLLDEIGTAFSLL

SEQ ID NO: 597 - protein, 1366 aa, Pediococcus acidilactici
MGDRKYNLGLDIGTSSIGFAAVDENNQPIRVKGKTAIGVRLFEEGKTAADRRGFRTTRRRLSRRRWRINLLNEIFDAHLAEVDPTFLARLKESNRSNLDPKKSFQGSLLFPERKDYQFYEEYPTIYHLRKALMEEDRKFDIREIYLAVHHIIKYRGNFLNGTPMRSFKVENIELDTLFDQLNQLYAEIVPDNELAFDLAQVADVKDVLSSTTIYKMDKKKQLVKMMLLPASNKALQSENKKIVTQFVNAILNYKFKLDVLLQVETDADWSLKLNDEGADDKLEEFTGDLDENRLEIIDLLQRLHNWFSLNEITKDGNSLSAAMVEKYENHHHHLGLLKKVIENHPDAKKAKALKETYTAYVGKTDDKTQNQDDFYKAVEKNLDDSPDAKEIKRLIQLDQFMPKQRTGQNGAIPHQLHQQELDQIIEKQSKYYPFLAEPNPNVKRRKDAPYKLDELIAFKIPYYVGPLVTPEEQAQNKENVFAWMKRKAAGPITPWNFDEKVDRMESANRFIRRMTTKDTYLFGEDVLPAESMIYQKFVVLNELNNLKINGRHLSLKDKQDVYNDLFKQQKTVSIKALQNYYVTKKKAATAPTVGGLADPKKFLSSLSTYIDFKNMFGERVNDPQFQEDLEQIVEWSTIFEDRGIFKAKLQALGWLSEKQIQQLVAKRYKGWGRLSKKLLTGLKNAEGYSILDEMWRSTENFMQIQTRPEFAALIQQANEKQFEGNDPNNVWENIESILGDAYTSPQNKKAIRQVVKVVQDIEKAVGNPPEKIAIEFTREAAANPQRTQSRLRTLEKLYESAEEVVDAGLTAELAEFKENKHVLSDKYYLYFTQLGRDVYTGDTISLDKLNDYDVDHILPQSFIKDDSLDNRVLTIRAVNNGKSDNVPAKMFGKKMGSFWRYLLDNGMISKRKYNNLITDPDNISKYAQKGFINRQLVETSQVIKLTANILNGIYDKDTEIIEVPAKMNSQMRKMFDLVKVREVNDYHHAFDAYLTIFIGKYLYKCYPKLRPYFVYGKFKKFGDNEDIEVGDGRFNFLNRIERLKNVTDPETGEILWSNVAPNETIKQIKKVYNYKFMLVSRETTTRRAELFNQTVYPKNYRGKLIPIKEDRPTDLYGGYSGNTDAYLAIVALEDKKKGKYFKVVGIPTRAAAKLEKLKQQDSQQYLQALHKVIAPQFTKSTKKGIKKTEFEIVLDKVHYRQLVQDGPVKMMLGSSTYKYNAKQLVLSEKALQVIADDRKFDETQKDDNLIAVYDEILSIVNQSFDLYDINGFRKKLNDNRDQFIDLPAETKYEGRKVVAHGKREMILEILKGLHANAAFGNLKPIGFSTAFGQLQVPNGIILSKNAILIHQSPSGLFERKIKLSDL

SEQ ID NO: 598 - protein, 1229 aa, Pediococcus acidilactici; identical to SEQ ID NO: 130

SEQ ID NO: 599 - protein, 270 aa, Pediococcus lolii
LFNQTIYSAKASKTMIPIKNDRPTKLYGGYSGNEDAYMSIIRLSDKKKTYKVVGISMRDASKLKAYENNAHEEYLKKLKEVIEQQFLDSGKKTKADFEIVIPKVNYHQRMQDGTKQFRIGSSKYVHNTKQLVLSEKTLKAIRNNKQYNGDAEKDLINAFDEILTIVNDSFSIFDIRSFRKKLNESRDKFVSLPVEDTKEKSKVIKGKRETLKQILIALHANGTSQDIPQLGLKSFGKMVKTGGLTLSENTALIHQSPSGLFEHKIKLSDL

SEQ ID NO: 600 - protein, 1016 aa, Pediococcus lolii
MNGIFDAHLAEVDPTFLARLKESNRSNLDPKKSFQGSLLFPERKDYQFYKEYPTIYHLRKALMEKDRKFDIREIYLAVHHIIKYRGNFLNGTPMRSFKVENIELDTLFDRLNQLYEEIIPDNELAFDLEQVADVKEVLSSTTIYKMDKKKQLVKMMLLPASNKALQSENKKIVTQFVNAILNYKFKLDVLLQVETDADWSLKLNDEGADDKLEEFTGDLDENRLEIIDLLQRLHNWFSLNEITKDGNSLSAAMVEKYKDHRHHLELLKKVIEDHSDAKKAKALKETYTAYVGKTDDKTQNKDDFYKAVEKNLDDSPEAKEIKRLIQLDQFMPKQRTGQNGAIPHQLHQQELDQIIEKQSKYYPFLAEPNPNVKRRKDAPYKLDELIAFKIPYYVGPLVTPEEQAQNKENVFAWMKRKAAGPITPWNFDEKVDRMESANRFIRRMTTKDTYLFGEDVLPAESMIYEKFVVLNELNNLKINGRHLSLKDKQDIYNDLFKQQKTVSIKALQNYYVTKKKAATAPTVGGLADPKKFLSSLSTYIDFKNMFGERVNDPQFQEDLEQIVEWSTIFEDRGIFKAKLQALGWLSEKQIQQLVAKRYKGWGRLSKKLLTGLKNAEGYSILDEMWHSTENFMQIQTRPEFAALIQQANEKQFEGNDPDNVWENIENILGDAYTSPQNKKAIRQVVKVVQDIEKAVGNPPEKIAIEFTREAAANPQRTQSRLRTLEKLYESAEEVVDAGLTAELAEFKENKHVLSDKYYLYFTQLGRDVYTGDTISLDRLNDYDVDHILPQSFIKDDSLDNRVLTIRAVNNGKSDNVPAKMFGKKMGSFWRYLLDNGMISKRKYNNLITDPDNISKYAQKGFINRQLVETSQVIKLTANILNGIYDKDTEIIEVPAKMNSQMRKMFDLVKVREVNDYHHAFDAYLTIFIGNYLYKCYPKLRPYFVYDNFKKFGNKEDIGHKRFNFLGKIERDKKVVAPETGEILWSNVAPNETIKQIKKVYDYKFMLTSHETYTKHG

SEQ ID NO: 601 - protein, 1333 aa, Planococcus antarcticus
MKNYTIGLDIGVASVGWVCIDENYKILNYNNRHAFGVHEFESAESAAGRRLKRGMRRRYNRRKKRLQLLQSLFDSYITDSGFFSKTDSQHFWKNNNEFENRSLTEVLSSLRISSRKYPTIYHLRSDLIESNKKMDLRLVYLALHNLVKYRGHFLQEGNWSEAASAEGMDDQLLELVTRYAELENLSPLDLSESQWKAAETLLLNRNLTKTDQSKELTAMFGKEYEPFCKLVAGLGVSLHQLFPSSEQALAYKETKTKVQLSNENVEEVMELLLEEESALLEAVQPFYQQVVLYELLKGETYVAKAKVSAFKQYQKDMASLKNLLDKTFGEKVYRSYFISDKNSQREYQKSHKVEVLCKLDQFNKEAKFAETFYKDLKKLLEDKSKTSIGTTEKDEMLRIIKAIDSNQFLQKQKGIQNAAIPHQNSLYEAEKILRNQQAHYPFITTEWIEKVKQILAFRIPYYIGPLVKDTTQSPFSWVERKGDAPITPWNFDEQIDKAASAEAFISRMRKTCTYLKGQEVLPKSSLTYERFEVLNELNGIQLRTTGAESDFRHRLSYEMKCWIIDNVFKQYKTVSTKRLLQELKKSPYADELYDEHTGEIKEVFGTQKENAFATSLSGYISMKSILGAVVDDNPAMTEELIYWIAVFEDREILHLKIQEKYPSITDVQRQKLALVKLPGWGRFSRLLIDGLPLDEQGQSVLDHMEQYSSVFMEVLKNKGFGLEKKIQKMNQHQVDGTKKIRYEDIEELAGSPALKRGIWRSVKIVEELVSIFGEPANIVLEVAREDGEKKRTKSRKDQWEELTKTTLKNDPDLKSFIGEIKSQGDQRFNEQRFWLYVTQQGKCLYTGKALDIQNLSMYEVDHILPQNFVKDDSLDNLALVMPEANQRKNQVGQNKMPLEIIEANQQYAMRTLWERLHELKLISSGKLGRLKKPSFDEVDKDKFIARQLVETRQIIKHVRDLLDERFSKSDIHLVKAGIVSKFRRFSEIPKIRDYNNKHHAMDALFAAALIQSILGKYGKNFLAFDLSKKDRQKQWRSVKGSNKEFFLFKNFGNLRLQSPVTGEEVSGVEYMKHVYFELPWQTTKMTQTGDGMFYKESIFSPKVKQAKYVSPKTEKFVHDEVKNHSICLVEFTFMKKEKEVQETKFIDLKVIEHHQFLKEPESQLAKFLAEKETNSPIIHARIIRTIPKYQKIWIEHFPYYFISTRELHNARQFEISYELMEKVKQLSERSSVEELKIVFGLLIDQMNDNYPIYTKSSIQDRVQKFVDTQLYDFKSFEIGFEELKKAVAANAQRSDTFGSRISKKPKPEEVAIGYESITGLKYRKPRSVVGTKR

SEQ ID NO: 602 - protein, 211 aa, Porphyromonas catoniae
MGKKVLGLDLGVGSIGWCLITLDKDEKPQSILGMGSRIVPLSADDATEFTQGKAITKNKMRTVARTIRKGMDRYQLRREALKKVLREHAMLPDEALIKLPLLELWELRARAATPGEQVSLTELGRVLLHINQKRGYKHAKADEAAEAETKKGKETGYVAQVKGRYQILKEKGLTIGQHFAGELRANQQTAPRGTYYTYRIKEQVYPRVRGV

SEQ ID NO: 603 - protein, 1009 aa, Porphyromonas catoniae
MRIIREAYIEEYDRIMAVQRVFYPELLTDALIGRIRDRIIFYQRPLKSCKQLVSFCEFEKKEKVIRVKHTNKEGVQELVEKTITIGPKVAPKSSPIFQVCKVWESIHNIRLYHPDGTERKLEQEEKQKLFDYLQRNDKLSLTTLRKELKIKPKDKLWCDKLLEKGIAGNTTAAILRKAFKGYEHYERLFRFDLVRRDSHEADEDGVIRPIIDESYQNEPLYKLWHILYSIEDRAEMRSALIGQLGIKAEDLDNGLMDALYKIDFVKQGYGNKSAKFICKLLPHLQEGKMYSEAAEAAGMRHSDSMTAQERDERNLLEEIPLLQKNALRQPVVEKVLNQMINLVNALKREHGEIDEVRVELARELKMSREEREKATKNNSSREKENKAIAERITEYGLTPTKSRIQKYRLWQESAESCIYCGKRVDVVQFLRGEETEVEHIIPKSILFDDSLSNKACACRSCNQEKGNRFAMEYIQAKGWEQDYIERVDSLFHDKKISYSKRQHLLMLPKDLPEDFIERHLRLSQYISREAQGILRKGIRLVSASEGGVTAKLRQLWGYDNILRDLNLERYKSMGETEVVTVEHRDGQRTDERIKDWSKRKDHRHHAIDALVVACTRQSYIQRLNRVNAEADRQEMDAFIKEQQQEHKLSKKEKLSLLENWLKEQPHFTTGEVKEHAEGILISFRPGKRTVSRGRNIYKRSGKTDVQRNVLIPRGALSEETVYGVISVDGENKVVCKYPLQKFLDTKETNVDKIADQAAEKIVDKVLREKIRERIKRYGKKEAFAEPLYLDEAQTQVVRSVRCFISKDQAKLIPLRYNDESEAVGFVAPGNNHHLALYRDASGKMRASVVSFFAAVERARYGIPMIVLNPRETREKARIIPDLPESIFSKLPEEDWVLEETLQEGEMVLLGMENDAIEEAIKKKDYSKLSRYLYRVQSLSYNDYKFCFHLETESEKKEKKKGEDKKRGEKAKNTAVMPPKRYRIRCLATYQEDLNPRKVKIDLLGRISLA

SEQ ID NO: 604 - protein, 1197 aa, Porphyromonas sp.
MLMSKHVLGLDLGVGSIGWCLIALDAQGDPAEILGMGSRVVPLNNATKAIEAFNAGAAFTASQERTARRTMRRGFARYQLRRYRLRRELEKVGMLPDAALIQLPLLELWELRERAATAGRRLTLPELGRVLCHINQKRGYRHVKSDAAAIVGDEGEKKKDSNSAYLAGIRANDEKLQAEHKTVGQYFAEQLRQNQSESPTGGISYRIKDQIFSRQCYIDEYDQIMAVQRVHYPDILTDEFIRMLRDEVIFMQRPLKSCKHLVSLCEFEKQERVMRVQQDDGKGGWQLVERRVKFGPKVAPKSSPLFQLCCIYEAVNNIRLTRPNGSPCDITPEERAKIVAHLQSSASLSFAALKKLLKEKALIADQLTSKSGLKGNSTRVALASALQPYPQYHHLLDMELETRMMTVQLTDEETGEVTEREVAVVTDSYVRKPLYRLWHILYSIEEREAMRRALITQLGMKEEDLDGGLLDQLYRLDFVKPGYGNKSAKFICKLLPQLQQGLGYSEACAAVGYRHSNSPTSEEITERTLLEKIPLLQRNELRQPLVEKILNQMINLVNALKAEYGIDEVRVELARELKMSREERERMARNNKDREERNKGVAAKIRECGLYPTKPRIQKYMLWKEAGRQCLYCGRSIEEEQCLREGGMEVEHIIPKSVLYDDSYGNKTCACRRCNKEKGNRTALEYIRAKGREAEYMKRINDLLKEKKISYSKHQRLRWLKEDIPSDFLERQLRLTQYISRQAMAILQQGIRRVSASEGGVTARLRSLWGYGKILHTLNLDRYDSMGETERVSREGEATEELHITNWSKRMDHRHHAIDALVVACTRQSYIQRLNRLSSEFGREDKKKEDQEAQEQQATETGRLSNLERWLTQRPHFSVRTVSDKVAEILISYRPGQRVVTRGRNIYRKKMADGREVSCVQRGVLVPRGELMEASFYGKILSQGRVRIVKRYPLHDLKGEVVDPHLRELITTYNQELKSREKGAPIPPLCLDKDKKQEVRSVRCYAKTLSLDKAIPMCFDEKGEPTAFVKSASNHHLALYRTPKGKLVESIVTFWDAVDRARYGIPLVITHPREVMEQVLQRGDIPEQVLSLLPPSDWVFVDSLQQDEMVVIGLSDEELQRALEAQNYRKISEHLYRVQKMSSSYYVFRYHLETSVADDKNTSGRIPKFHRVQSLKAYEERNIRKVRVDLLGRISLL

SEQ ID NO: 605 - protein, 1422 aa, Prevotella denticola
MTQKVLGLDLGTNSIGSSVRNLDLSDDLKGQLEFFSSDIFRSSVNKESNGREYSLAAQRSAHSRSRGLNEARRRKLWATLDLLIKYGFCPMSPESLMRWRTYDKQRGLFREYPIDDKNFNAWILLDFDGDGKPDYSSPYQLRRELVIRQFDFDQPIERYKLGRALYHIAQHRGFKSSKGETLSQQETNSKQSLTDDTADVAGEMKASEEKLSKGLSTYMKENNLLTVGAAFAQLEDEGVRVRNNNDYRAIRSQFQREIETIFKFQQGLSVENELYERLVSEKKNIGTIFYKRPLRSQRGNVGKCTLERTKPRCAIGHPLFEKFRAWTLINNIKVRMSEEEQAEQLPMKLRFELYNDCFLAFVRAEFKFEDIRKYLEKRLGVHFSYNDKTINYKDSTSVAGCPITARFRKLLGEDWESFHVDGQKQRQAHGKNNASFHTVSYSTNDIWHFCYDAEEPEAVLSFAQDNLKWEKKKAEELVRIWSAIPQGYAMLSQKAIRNINKMLILGLKYSDAVLLAKVPEIVEITDGEILSVTEDYHRVEAQVGYEKQINNIVNALIAKYKSASEEYRFADHNYEYQLDKSDEKDIIKQIESNIGTRKWSLLDADEQTDILQKVRDKYQNFFRSHERKFVESPKLGECFEEYLMKKFPMVEGERWKKLYHPSQIAIYRPVPANKDRSALRLGNPDIGAIKNPTVLRVLNTLRKRVNQLLDDGIISPDETRVVVETARELNDANRKWALDTYNRIRHDENEKIKKILAEFYPKRDNISTVDIDKARYVIDQREMDYFTEAKTYHKDIKKYKLWLEQGGQCMYTGRTINLSNLFDPNSFDVEHTIPESISFDSSDMNLTLCDAHYNRFIKKNHIPADLPNYDKSVVIDGKEYSPIKPRLQRWADRVERLNRNVEYWRGQARRAQNKDRKDQCMREMHLWKMELEYWTKKLERFTITEVTDEFKNSQLVDTRVITRHAVLYLKSIFPHVDVQRGDVTAKFRKILGIQSVDEKKDRSLHSHHAIDATTLTIIPGAAKRERMLELFAKIEEVNKMLSFSGNEDRTGLKQELDGLKNQLNKEVKACRIGHNVSEIGTFINDNIIINHHVKNQALTPVRRRLRKRGHIVGGMDNPRWQTGDALRGEIHKASYYGAITQYAKDKEGKVLMKEGRPQINPTIKFVIRRELKYKKSSTDSGFASWDDLGKAIVDKELFALMKGQFPEGTSFKDACEQGIYMIKKGKNGEVDTKLYRIRHIRCKTKQKNALKIKEQAYKSEKEYKRYFYAAVGDLYAMCCYTNGKTREFKIYSLYDISCHRKVGVEDIPEFITDKKGNRLMLDYKLHTGDMILLYKENPEELYDLDNVSLSKLLYKINGFENDGLRIRMVNHLVAKEAMGESVKDYAKLPDIIRCGVKTIKFLVMGENRDFVIKNGKISFNHR

SEQ ID NO: 606 - protein, 443 aa, Prevotella disiens
MELDYWKGKYNRFTMTEIPEGFSRRQGMGIGLISRYAGLYLKTIFHKKDNPQKSNVYIVKGSITAEFRRIWNIQDDYEKKCRDNHIHHCIDAIVVGCIGKREYDLMAQFYRDEEKYRWEKKKKPFFKKPWETFTQDMLSLKDEVLTVHFNPSNFTKKAHKKVFTPKGIFVAQGDCARVKLHKESYFGAIEQKGEIKYVMRKELSALKIEDIKNIVDAVVKEKVLAVVKKKGFKQAMAEPIYMNEDKRILIKKVRLFVSQTNPLIVKKHRDLSSKEYKQNYYVDNEGNLMIAMYEGVKKNGKIDREITVVNNLEAAKFFRQSQKNNAEKQLISHLSPKNGYPLKTVLTQKQLVLMYEDSPKEIKLRDTKNMVKRLYQVVEIEKDGRVKLKFHQEARSEGLNKNSAAFKIQDTPESLYRHTKSNLKVLVNGVDFKINILGEISLI

SEQ ID NO: 607 - protein, 1375 aa, Prevotella histicola
MKKILGLDLGTTSIGWALVYESENTDEKSSIVRLGVRVNPLSVDEKGNFEKGKAITTNADRQQTHGARINLQRYKLRRENLKDCLQKQGWIGTEALCEEGKTSTFETYMLRAKAAEEEISLHELCRVLFMMNKKRGYKSNRKANNKEDGKLFDGMTVAKKLYEEHLTPAEYSFQLLSSGKKFKQEYYRSDLKEEFDRIWNEQQKYYPEILTDDFKQQLQGKSKGNTSKIFLGKYGIYSADLKGLDRKLQPLKWRVEALKQQVDKEVLAFVISDLNGQIASTSGLLGAISDRSKELYFNKQTVGQYLWTSLKETPHVSIKNKPFYRQDYLDEFEKIWETQATYHKELTPELKQEIRDIIIFYQRPLKSKKGLISVCELEQRKVKVTIDGKEKEISIGPKVAPKSSPMFQEFRIWQNLNNILLIDKGNNSIHPLYEEEKNLLYEELSVKEKLSKAEALKVLNKNSKQWDLNYKEIEGNRTQAVLYDCYNRIIVMTGHEEYNFKKLKASEIRSYVKTTFTGLGFNTDILEFDSSLTGHELEKQPMYQLWHLLYSYESDNSRTGNDALLRKLETAFGFPKEYAAVLSDVVFEDSYGNLSVKAMRKILPHLQAGLNYSQACEEAGYKHSRRSLTKNELDQKEYKEKLELLPKNSLHNPVVEKILNQMINVINAVIDEYGKPDEIRIELARELKIGAAERENMTRSINQGNAENKRIREILEKEFALSYISRNDIIKYKLYEELKSNGFKTLYSDTYISKDKLFSKDFDIEHIIPKARLFDDSLSNKTIEARDVNIAKSNKTAFDFISEKYDQQGIEAYKKKLDILLQDGSISKAKYNRLLMKEADIPSGFIDRDLRDTQYIAKKAYEILSDLVRNVTPTTGAVTSRLREDWQLVDVMKELNFEKYQKLGLVEVIEDRDGRKIKRIKDWTKRNDHRHHAMDALTIAFTKPSYIQYLNNLNARSDKNSSIYGIENKELHREDNKLRFNAPLPINEFRAEARRHLKSILVSVKAKNKVMTQNVNVIKTKHGVIKKVQLTPRGELHNATFYGTKKRPIIKMVKVGAALDEVTIKKVSSSFIREALLDRLHEYNGDAKKAFTGRNSIDKNPIYIDEEHKKTVPALVKTIEWEMYHPTRKLISPDLKIDKVIDKGIREILKTRLAKFNGDAQKAFSNLDENPIYKDEAKKITLKRVSLEGVSSVIPLHTLKDREGKLVVGKDGKPVLGDYVQTSNNHHIAFYMDENGNLQDNVVSFFEAAERKSQGVPVIDKNYNHDKGWNFLFTMKQNEYFVFPNEVTGFNPSEVDLMDEANYSIISPNLYRVQKMSKASGRDYWFRHHLEAMLNDDPKLRNSMFKRITSLKALEGIVKVRINCIGKIVAVGEYD

SEQ ID NO: 608 - protein, 1380 aa, Prevotella intermedia
MKRILGLDLGTTSIGWALVNEAENNNEASSIVRLGVRVNPLTVDEKSNFEKGKAITTNADRQLRHGARINLQRYKLRRQNLHDCLQKQGWLGTEAMYEEGKASTFETYKLRAKAAEEEISLHEFARVLFMLNKKRGYKSNRKANNKEDGQLFDGMTIAKKLYEEHLTPAEYSLQLLNKGKKFTQGYYRSDLNAELERIWDEQKKYYPEILTDEFKQQLEGKTKTNTSKIFLAKYGIYSADLKGLDRKFQPLKWRVEALQQQVDKEVLAFVISDLKGQIANTSGLLGAISDRSKELYFNKQTVGQYLWASLEENPHISIKNKPFYRQDYLDEFEKIWETQAAFHKQLTPELKQEIRDIIIFYQRPLKSKKSLISVCELEQRKVKATIDGKEKEITIGPKVAPKSSPVFQEFRIWQNLNNVLLIDNDTNEKRPLDEVERNLLYKELSIKAKLSKTEALKILNKKGKQWDLNYRELEGNRTQAILFDCYNRIITLTGHEECDFKKIKASEIRHYVSTIFKNLGFSTEILDFDPSLKKHELEKQPMYQLWHLLYSYESDNSRTGNESLLRKLETTFGFPEEYATVLCDVVFEEDYGNLSVKAMREILPYLQAGNDYSQACAYAGYNHSRHSLTKEELDQKVYKERLELLPKNSLRNPVVEKILNQMINVINAIIDEYGKPDEIRIEMARELKSSAADRKKTTHAISQGNAENQRIREILEKEFSLSYISRNDIIKYKLYEELEPNYYKTLYSDTYITKDKLFSKDFDIEHIIPKARLFDDSFSNKTLEARNINLEKSNKTAFDFIKEKYGEDGAEAYKKKLDMLLENDAISRPKYNNLLRAEADIPSDFINRDLRNTQYIAKKACEILGELVKTVTPTTGKITNRLREDWQLVDVMKELNFEKYEKLGLTEIVEDRDGRKIKRIKDWTKRNDHRHHAMDALAIAFTKPSFIQYLNNLNARSNKGDSIYAIENKELHYEEGKLRFNAPIPVNEFRAEAKRHLSAILVSIKAKNKVMTQNVNKIKTKHGIIKKIQLTPRGPLHNETIYGTKMRPIIKMVKVGAALDEATINKVSSPAIREALLKRLNEYSGNAKKAFTGKNTLEKNPIYLNAGRTKTVPSLVKTVEWESFHPTRKLIDKDLNVDKVVDKGIREILKARLEEFNGDAKKAFSNLEENPIYLDEAKKIALKRVSIEGVLSAIPLHTLKNQAGKPITGKDGKPVLGNYVQTSNNHHIAFYYDEDGNLQDNAVSFFEAAERKSQGIPVIDKDYNRDKGWRFLFTMKQNEYFVFPNEATGFIPSEVDLTDEANYGIISPNLYRVQKVSRIDKGTSASRDYWFRHHLETILNDDAKLKNLAFKRIRGLLELKDIIKVRINSTGKIVAVGEYD

SEQ ID NO: 609 - protein, 129 aa, Prevotella multiformis
MQKGGTGCKINRQTVGNVEVNVLNLRLYDRTDDREVTAGYLPTKEDYVRLFVYLNDRKEINQDTLLKDYFRLKKVKCGNEKEFAIRWNYIEDKEKKYPCNETRHELLAALDRAGMEHGWLDDSGTSARW

SEQ ID NO: 610 - protein, 535 aa, Prevotella multiformis
MVKGLLSNIVRTAEEREETSKFVISCTGRITDRLKQDWGLNDVWNSLVYTRFKRLNELTETEAFGHWQDKDRRVFQTSVPLELQRGFSKKRIDHRHHAMDALVIACASRNIIGYLNNESAESPEKREDLRRKLCDKNHIIRKPWESFTQDARAALEDIVVSFKNYVRIINKATNYYERYDADGRKTKAEQKGGEMWAVRKPMHEATYYGKVNLRRKERVSLKAALEDIPSICNRDLRDYINGLVEKHFNKEQVLAQFRSVGNRWNKQHIDKVDVWRFSDGKEEMVATRKPLDTSFDAKRIEAVTDTGIQRILSNYLEAKGGDPKIAFTPEGIADMNQHITAYNNGKQHKPILKVRVSTKLGKKYPVGQTGCKAGQFVVAEAGTNLYFAVYEDGEGNRSYDTIPLNEAVECLKQGLPPVPETREKGDRLKFYLSPNDLVYVPAGDEENEIDRERIYKFVDSSGTTANFIPHRTAGLIYNVDKKLAEALCNGSIIQNEYGVGSQQSKNQKALTGEMVKAVCWKLEVDRLGNILRIIK

SEQ ID NO: 611 - protein, 1380 aa, Prevotella nigrescens
MKRILGLDLGTTSIGWALVNEAESNNEASSIVRLGVRVNPLTVDEKSNFEKGKAITTNADRQLRHGARINLQRYKLRRQNLHDCLQKQGWLGTEAMYEEGKASTFETYKLRAKAAEEEISLHEFARVLFMLNKKRGYKSNRKANNKEDGQLFDGMTIAKKLYEEHLTPAEYSLQLLNKGKKFTQGYYRSDLNAELERIWDEQKKYYPEILTDEFKQQLEGKTKTNTSKIFLAKYGIYSADLKGLDRKLQPLKWRVEALKQQVDKEVLAFVISDLKGQIANTSGLLGAISDRSKELYFNKQTVGQYLWASLEENPHISIKNKPFYRQDYLDEFEKIWETQATFHKQLTPELKQEIRDIIIFYQRPLKSKKSLISVCELEQRKVKATIDGKEKEITIGPKVAPKSSPVFQEFRIWQNLNNVLLIDNDTNEKRPLDEDERYLLYKELSIKAKLSKTEALKILNKKGKQWDLNYKELEGNRTQAILFDCYNRIITLTGHEECDFKKIKASEIRHYVSTIFKNLGFSTEILDFDPSLEKHELEKQPMYQLWHLLYSYESDNSRTGNESLLRKLETTFGFPEEYATVLCDVVFEEDYGNLSVKAMRKILPYLQAGNDYSQACAYAGYNHSRHSLTKEELDQKVYKERLELLPKNSLRNPVVEKILNQMINVINAIIDEYGKPDEIRIEMARELKSSAADRKKTTHAINQGNDENQCIREILEKEFALSYISRNDIIKYKLYEELKPNGFKTLYSDTYIPKDKLFSKDFDIEHIIPKARLFDDSYSNKTLEARDINLAKSNKTAFDFVKEKYGEQGAEAYKKKLDMLLGNNVISKPKYNKLLMTEADIPSDFINRDLRNTQYIARKACEILGELVRTVTPTTGKITNRLREDWQLVDVMKELNFEKYEKLGLTEIVEDRDGRKIKRIKDWTKRNDHRHHAMDALAIAFTKPSYIQYLNNLNARSNKGDSIYAIENKELHYEEGKLRFNAPIPVNVFRAEAKRHLSAILVSIKAKNKVMTQNVNKIKTKHGIIKKIQLTPRGPLHNETIYGTKMRPIIKKVKVGAALDEATINKVSSPAIREVLLKRLNEYSGNAKKAFTGKNTLDKNPIYLNAERTKTVPASVKTVEWENYHPIRKPITPDLKVDKVIDKGIGEILKARLEEFNGDAKKAFSNLEENPIYLDQTKKIALKRVSIEGVLSTIPLHTLKNQAGKPIMGKDGKPVLGNYVQTSNNHHIAFYYDEDGNLQDNAVSFFEAAERKSQGISVIDKDYNRDKGWRFLFTMKQNEYFVFPNEATGFIPSEVDLTDEANYGIISPNLYRVQKMSRIEKGTSVSRDYWFRHHLETILNDDSRLKNSAFKRINSLKPLEGIIKVRINSIGKIVAVGEYD

SEQ ID NO: 612 - protein, 1506 aa, Prevotella nigrescens
MKTILGLDLGPNSIGWAKVEVDDEGNYLRNIKLGSRIIPMTQDMLGDFDKGVKVSQTAIRTDFRGNRRLIERHLLRRERLHRVLHALKFLPKHYEDAIGWDRNEPATYGKFVNNSEPKLAWERQEDGSMRFLFMESFNEMVADFAQNQPSLVSDGKKIPLDWTIYYLRKKALTRPIKKEELAWILLNFNQKRGYYQLRGEEEEDNLTKRKEYYKLKVVGVEADGAPKGGKTWYNIHLENGWTARCQSKIPLDDWVGKVKEYIVTTEYEDDGKTPKCDKEGKVKRSFKSPEKDDWQLIKTRTEKFIDDSNKTVGAFIYDYLLEKPFDKIRGKYIRTIERKYYKNELREILREQTKYHEGLHSLEALKICAEELYKNNQQHQEYLLKKDMTFLLLNDLIFYQRPLKSKKSLIADCPYEVYKYDDKLTGKKGQKKIKCIAKSNPYYQEFRLWQFIANLRLFSVTDGKEVTAEYLKTEEDYVRLFSFLNDRKDIKQETFLRSFLKLKKESIGSEKIYPIRWNYIEDANKSYPCNATRHELLLAFDRADIPRELLDVEEREYRLWHLLYSIEAKEETESALRKLKANKAFGDLNIDDAFVNSFLKIKPFEKEYGAYSEKAIKKLLAVMRRGSLWKEADICEATKQNIAKILQNDIDEKLKKKIEAAVSSFNKLSDFQGLPTWLACYVVYGRHSEAAQIQCWQSPEDLKTYINKFKQHSLRNPIVEQCLLETLRTVYDIWKDAGQIDEIHIELGRNMKSTAEQRARKTKDILRNENTNLRIKNLLVELKNDDKIENVRPYSPSQQEILRIYEEGALQELSKEDEMFEDISKISKMAQPSPTELSRYKLWLEQKYRSPYTGRVIPLSKLFTTAYQIEHIIPQSRYFDDSFNNKVICESEVNSLKDNMLGYEFIKECGGRIVHCTLLGDVKIFTKEEYKDFVTKHYIDNTYKRDKLLLEDIPQEFSARQLNDSRYISKMVQTVLSNIVRAENEQEATSKFVVSCNGAITNRLKKDWGLNDVWSSIVCPRFKRLNEITKTNAFGHWEDKAGKHVFQTTVPLELQRGFSKKRIDHRHHAMDALVIACASRNIVNYLNNESANSPEKREDLRKKLCDEKRKIRKPWKTFTQDAREALSDVVVSFKNYVRVINKATNYYEHYSSSGNKVMISQKGNDMWAIRKPLHKESVFGRVNLCRKVIVSLKKALENIPAICDKTLRDYINALVEKHFNTRQLLAHFKSINYRLNRQCVEKVEVWQFSDEKIEMVARRKSLDTSFDDKQISSITDTGIQKILLNYLQTKDGNAEIAFTPEGIEEMNKNISLYNDGKAHQPILKVRVATPKGMKYPVGQTGNKATKFVVAEKGTNLYFAIYENELGVRSYDTIPLNIVVERLKEGLSPVPQANEADIPLKFYLSPNDLVYVPTKENEDELCRDRIYKFVDSSGTTANFVPHTSANTIYNVDKEYAEKCCNGAVFLNEYGLGSPQSKNQRALTGEMIKEICWKLKVDRLGNIIKVIK

SEQ ID NO: 613 - protein, 774 aa, Prevotella oulorum
MEQCILETLRTVYDIWKEAGQIDEIHVELGREMKQTAEQRAHLTEKVLRNENTNLRIKSLLMELKNDADMKDVRPYSPMQQEILRIYEEGALQTLSKDDAAFTEIMKISKMAQPSASELQRYRLWLEQKYRSPYTGKPISLSKLFTSAYQIEHIIPKKRYFDDSFSNKVICEAEVNGKKDSMLAYEFIKDCGGDVIHCTTLGDVTILSEAEYKALVTELYANNKSKKDKLLMEDIPQDFINRQLNDSRYISRVVMTLLSNIVRIEGEEEATSKFVIPCSGGITDKLKKDWGLNDVWNNIVYPRFERLNALTNTSDFGQWENKEGKRVFQTSVPLELQRGYQKKRIDHRHHAMDALVIACASRKIINYLNNQEANDPTKQENARKQLCIKSRIIRKPWETFTQDAYKALDNIVVSFKNYVRVINKATNYYERYNADGKKAVDEQKGEAMWAIRKPMHKDTVFGHVNLRRKAVVKLKDALENIPAICDKTLRHYIQDLQKKHFNTKQLLAHFKSINYRLNKQAVDKVEVWQYSDDKEQLAATRKPLGPSFDAKCIAAITDTGIQKILLNYLQAKGGDPAIAFTPEGIAEMNQNIAVYNGGKQHQPILKVRIAKPMGKKFPIGQTGNKAFQYVIAEEGTNLYFAIYEDEEGNRTYDTIALREVVERLKQGLTPVPEKNEKGVALKFHLSPNDLVYVPTADELLSKVCSLDKNRIYKMVSATKSECLFIPHSVAKTIYDKVEFEALNKMGRALTGEMIKSVCWKIEVDRLGHIVNIIK

SEQ ID NO: 614 - protein, 691 aa, Prevotella oulorum
MKTILGLDLGTNSIGWAKVIVDDNENYLRDIQLGSRIIPMSQDVLGKFDKGVTESQTAIRTSFRGVRRLRERTLQRRERLHRVLHTLHYLPPHYDSAIGWDRKTPTTYGKFLNHGEPKLAWERREDGTMQFLFMDAFHEMIADFAKYQPALVADGKKVPLDWTIYYLRKKALTQPIKKEELAWILLNFNQKRGYYQLRGEEDEENAAKHEEYHELKVVGVEVDEAGKGDNTWYNVKLENGWTYHRQSKIPLDDWVGKVRAFIVTTEYEKDGTTPKKDKEGNVKRSFRSPDEKDWGLRKKQTEHSLEASGTPVGAFIYDHLLKEPSDKIRGKFIHTIERKYYKQELAAILREQSKHHEKLCSKDMLKACIEELYPNNPLHRESLLKKDMPYLLIEDLIFYQRPLKSKKSLIAECPYEAYSYVDKETGEMKRQGIKCIAKSNPYYQEFRLWQLIANLRLRNRSDERDVTAEYLPHQEDYVRLFTYLNDRKEINQETLLKDFFKLKKVTIGGEKVFPIRWDYIEDKEKKYPCNATRHELLLALDRAGIEHDWLNDRDLAYRLWHLLYSVDSKDETERALRKLKDDDAFVESFLKIKPFEKEYGAYSEKAIKKLLPVMRRGSLWNEADLCPSTKERIANILQGTIDEKLKKKIGAFISSCQQVSDFQGLPEWLACYVVYGRHSEATDIQRWETPE

SEQ ID NO: 615 - protein, 242 aa, Prevotella saccharolytica
MKLVLGLDLGVGSVGWALIFITDSGEPIKILALGERIVSMDSNNSNEFSAGATCTLNQKKTKAKSVRKGYSRYVQRRDALTAELRHIGMMPDETLIKLPVLDLWQLRANAATEGKKLSLAEIGRVLYHINQRRGYKHGKSDVSSDNKQKGYVKAVNERYCMIQERQQTIGQYFALKLKETAVTTEKGTFYTFRIKDQVFPREAYEEEFVVAYSTKVLKFKQITTLLNVVICLMMLLLIVQRY

SEQ ID NO: 616 - protein, 1174 aa, Prevotella sp.
MEFHPELCDAELLKACAEELYRNNEAHRAQLLAKDFKHLLVEDVLFYQRPLKSKKSLIANCPYETRQYINKETGEIKDVNVKCIAKSNPYFQEFRLWQWISNLRLLRQADGQDVTAAYIKGNEDKERLFDLLNNQGEIKQEHILRDFLKLKKPKGGEFPLRWNYVDDKIYPANETRHAINKAIKGMAVDKEEKETLGQLLDQPAVAYMLWNLLYSITDRNELARALRRFALTHGVSSVDAFVESFLKVKPFKKEYGAYSEKATKKLLQVMRLGKYWCGDELPEPAKRTKGNKQAVYDEMAHRGICKQTLQNISNIIEENIDERLMGALLNPERPLTELSHFQGLSVSDACYVVYGRHSEVAEIVKWKDADELNTFINNFKQHSMRNPIVEQCVLETLRTVRDVWEQEGQIDEIHVELGRNMKRTAEQRARDTQAIQRNENTNMRISLLLTELKNDPSISDVRPYSPSQRELLKIYEEGALENLTNQDEDIAKISRLAQPSASELRRYKLWLDQKYVSPYTGRPIPLAKLFTPAYEIEHIIPQSRYFDNSFSNKVICEAEVNKLKDNLLGMEFIKKFGGKTKGILDEEAYKLHVTTNYAHNPAKRSKLLMEDLPTDFNSRQLNDTRYISKTVMALLSNVVREEGERETRSKHVVVCTGGVTDTLKKDWGLHDVWHNLVYPRFIRLNNLTGSQNFGYWRYLNEENSKKGEDSKKVFQITLPPECQRGFVKKRIDHRHHAMDALVIACASANIVNYLNNQSAANPHIHENLQRLLCDRKREIRKPWPTFTQDAQAALKDLVVSFKNTVRVVNKASNTYLRYDKDGKKKRFKQEGEGLKAIRKPMHKETYYGEVNLIRKEMVPLKRALDDVNAIVDKELRASIKGLLRDGFNPQQVLANFKAKDFKFDKRDIKKVEVYVSSEKSTPMVATRKSLDTSFNAKRIADITDTGIQKILLNYLKANDNSPEQAFTPEGIAYLNEHIAEYNDGKPHQPILKVRVSEVKGAKFAVGQTGSKKDKFVEAQSGTNLYFAIYEDKEGKRHFETIALKVAAERLKDKQMPVPEINDAGLPLKFYLSPNDLVYVPTDEDRATAHPSIDKMRIYKMVSATDRQCFFLPFTVASVISNKVEFEALNKMERVLDASEYSSAYDSSHVNKVMVKNVCWKLEVDRLGNITKIVR

SEQ ID NO: 617 - protein, 992 aa, Prevotella sp.
MITRILGLDTGTNSLAWAVVDRDANGNYTLVKRGDVIFTEGVKIEKGIESSKAAERTAHKALRVHYSRRRLHKIDTLKVLVELNLCPCLSDEQLSQWKAKKTYPLTDDFMLWQRSGSAEENNPYYCRHRCLTQKLDLTDQSQRFLLGRAFYHLAQRRGFLSNRLDTSADSDESGKVKSGIAQLSVEMEKAGCEFLGEYFYQLYKQHGNTIKLRSRYTDREEHYKKEFLAICEKQELDPKWVEALQRAIYFQRPLKSQRKGVGKCTFEPKKPRCAESHPDYEAFRMLCFLNNVKIQTPNDTSLRPLNEDEREKIWPIFFRKSKPNFDFEDIAKALAGKNNYAWYKDAGEKPFKFNYRMQQGVSGCPVTAQLIDIFGSDWQTAIAETYTAVEKKNGTKTIDEMADDVWNVLYSFSSKDKLKAFATEKLQLDEASATKFANAKLPHGFASLSLKAIRNILPFLRQGFIYAHAVHLAKIPDIVTKAVWNDADKREMILSGLMEIIENYNPKDRGVEGTIDFCIKSHLQDVIDLRPGAADALYHPSMIETYPDAKLNKMGVFQLGSPRTNAIRNPMAMRSLHILRSVVNQLLRDGIIDRDTEVHVEYARELNDANKRKAIADYQREQEKKRKQYRDDIIALYKSECHKEIEPTDTDILKFQLWEEQNHLCLYTGTQIGICDFLGDNPKFDIEHTVPRSVGGDSTQMNLTLCDATFNRQVKGAQLPSQLSNHADILVRIDHWKSKCEDLRKQLDKIRTYGGMEKNMKDRLIQKRHRLKMDLDYWQGKYSRFTMTEVPEGFSRRQGAGIGLVSKYAGLFLKSLFHNEQNPNKSNVYVVKGVTTAEFRRMWGLQGEYEKKSRLNHCHHCIDAITIACIGKAEYDKMAQYYHDEELFQWRGTTTKPHFNKPWPTFTEDVLAIEQSLLVKHLTKDNMPKQAKKRVRTATGKYLAQGDTARGSLHKDTYYGAIEQNGEIRYVLRKPLNKFENEAELEKIVDQA

SEQ ID NO: 618 - protein, 1375 aa, Prevotella sp.
MKKILGLDLGTTSIGWALVNESENKDEQSSIVRLGVRVIPLTVDEKGNFEKGKAITTNADRQQVHAARINLQRYKLRRENLRDCLQKQGWIGSEPMCEDGKSSTFETYKLRAKAAVEEVSLHEFARVLFMLNKKRGYKSNRKANDKEEGKLFDGMTIAKKLYEEHLTPAEYSLQLLNTGRKFTPEYYRSDLIEEFEKIWNEQQKYYPEILTDEFKQQLEGKAKSNTSKLFLGKYGIYSADTKGLDRRLQPLKWRVEAMKQQVDKDVLAFVISDLKGQIANTSGLLGAISDRSKELYFSKQTIGQYLWASLQENPHISIKNQPFYRQDYLDEFEKIWETQATYHKELTSELKQEIRDIIIFYQRPLKSKKNLIAVCELEQRKVKVTVDGKEKEITIGPKIAPKSSPMFQEFRIWQNLNNILLLDHETNSKRPLYEEERNLLYEELSVKEKLSKTEALKVLGKKSKQWDLNYKELEGNRTQAVLYDCYNRIIVMSGHEECNFKKLKASDIRHYVKMIFKNLAFNTDILCFDSSLKGHELERQPMCQLWHLLYSYEGDNSRTGNDALLRKLETSFGFPKEYAAVLADVIFEDSYGNLSVKAMRNILPHLQAGKDYSQACEEAGYKHSRRSLTKEELNQKVYKEKLELLPKNSLHNPVVEKILNQMVNVINAVIEEYGKPDEIRIELARDLKIGAAERENMTRSINQGNAENKRIREILEKEFALSYLSRNDIIKYKLYEELKSNGFKTLYSDTYISKDKLFSKDFDIEHIIPKARLFDDSLSNKTIEARDVNIAKSNKTAFDFILERYGEQGVKTYKTKLLRLLEDGAISNKKYNNLLKTEADIPSGFIDRDLRNTQYIAKKAYEILSELVKIVTPTTGSVTNRLREDWQLVDVMKELNFEKYQKLGLADVIEDRDGRKVKRIKDWTKRNDHRHHAMDALTIAFTKPSYIQYLNNLNARSDKSSSIYGIEVKELHREEGKFRFNAPLPINEFRAEAKRHLKSVLVSIKAKKKVMTQNVNKIKTKHGIIKKVQLTPRGELHNATYYGTKKRPLVRMVKVGAALDEATIKRVCSPAIRAALLKRLNAYNGDAKEAFTGRNSIDKNPIYLDIEQTKLVPVLVKTIEWGMYHPIRKRITPDLKIDKVIDKGIREKLKARLAEFNGDAQKAFSNLDENPIYMDEAKRITLKRVSIEGVLSAIPLHTLKDKAGKPVIGSDGKPVFGDYVQTSNNHHIAFYIDDKGNLQDNPVSFFEAAERKSQGVPVIDRRYNCDKGWHFVFTMKQNEYFVFPNEATGFIPSEVDLLDEANYCIISPNLYRVQKLSKASGRDYWFRHHLETMLNDDLRLKNSTFKRIQSLKGLEDIVKVRINSIGKIVAVGKYD

SEQ ID NO: 619 - protein, 1483 aa, Prevotella sp.
MKTILGLDLGTNSIGWAKVSVDDYGNYLHDIKLGSRIIPMSQDVLGNFDSGVTVSQTAQRTEFRSKRRLVQRNLQRRERLHRVLHVLDFLPAHYDAAIGWDRTEAVTYGKFLNHAEPKLAWEELGNGKRRFLFMDSFHEMVADFARCQPALVADGKKIPLDWTIYYLRKKALTQAITKEELAWILLNFNQKRGYYQLRGEEEEENPTKQEEYYELKVVSVEATDSRKGNDTWYNVHLENGWIYRRSSKISLDDWVGKVKQFIVTTEYEKDGTTLKTDKEGNVKRSFRAPNENDWGLRKKRTETLLEMSGKTVGAFIYDHLLQEPADKIRGNFIRTIERHYYKAELEAILAEQCKYHIELRDKEMLEACARELYLNNLPHQRSLMKKDMTYLLLYDLIFYQRPLKSKKALIANCPYEYYEYVDKETGEIKRQNIKCIAKSNPYFQEFRLWQFVLNLRLFDRVEDKEVTANYLPTADDHARLFTYLNDRKEINQETLLKDYFKLKKVKIGNEKEYPIRWNYIEDKEKKYPCNETRYELLMALDRAGIEHKWLDDNNLEYRLWHLLYSVEVKSESETALRKLKNDDAFVNSFLKVKPFKKEYGAYSEKAIKRLLAVMRKGFLWNEQDICDETRKRIEIIIKGDVDEKVKERMGHAAYSFDRVSDFQGLPEWLACYVVYGRHSEAMDIQRWDSPERLMAYINNFKQYSLRNPIVEQCILETLRTVHDIWKETGQIDEIHVELGREMKSTSEERARRTQNVLRNENTNLRIKSLLIELKNDTDICNVHPYSPMQQEILRIYEEGALQELNREDEDFEEISKISQMSQPSGKELNRYKLWLEQKYRSPYTGKAISLAKLFTPAYQIEHVIPQSRYFDDSFTNKVICEAEVNTLKSNLLGYEFIKKHGGEIIHCTTLGDVRIFSESEYKAFVMDHYANNKSKKDKLLMEDIPQEFLSRQMNDSRYISKVVKTLLSNIVRMADESEATSKSVIVCTGGVTDRLKKDWGLNDVWNSIVYSRFERLNRLTGTEAFGHWENKDGKRVFQTSMPLELQRGFRKKRIDHRHHAMDALVIACASRNIVNYLNNESANNPKKREDLRRQLCDKNRVIRKPWETFTQDAYNALENVVVSFKNYVRVINKATNRYEHYDENGKKRFVQQKGSELWAIRKPMHKETYYGHVNLRRKELVTLQKALDDIPSICDKKLRDYISALVEKHFNKRQLLAHFKSTDYYWQKQYVNKVYVWTFSDDIKPLVATRKLLDTSFDAKRIGTITDTGIQKILRNYLEAKGGNATLAFTPEGIVEMNQNISKYNDGKPHQPILKVRITEPMGAKYRVGQTENKMAKYVEAQSGTNLYFAIYEDSEGKRSYTTVPLDEVAERLKQRLSPVPEKDENDVPLKFYLSPNDLVYVPTEEELQLRECKLNKDRIYKMVSSTGSECHFIPYYVANVIYNKVEFEAKNKIGRALTGEMIKAVCWKLEIDRLGNILKVIK

SEQ ID NO: 620 - protein, 593 aa, Prevotella sp.
MNTRILGLDTGTNSLAWAVVDRDAKGNYTLVRRGDVIFTEGVNVDGQPVPSKAAVKSKYKSLRVQYARRRLRKIDTLKVLVSLDLCPYLSDQQLSQWKAKKTYPLTDDFMLWQRSGSAEENNPYYCRYRCLTQKLDLTDQSQRFLLGRAFYHLAQRRGFLSNRLDTTSDSAESGKVKSGIAQLSVEMEKAGCTFLGEYFYQLYKQHGNTVRLRSRYTDREEHYIKEFLAICEKQELDAQWVEKLQRALYFQRPLKSQRKGVGKCTFEPKKPRCAESHPDYEAFRMLCILNNIKIKTPKDVSLRPLNAEEREKVWPLFFRKSKPNFDFEDIAKALAGKNNYAWYKDAGEKPFRFNYRMHQGVSGCPVTAQLIDIFGSDWKAGIAETYTAVGKKNGTKTIDEMADDVWNVLYSFSSKDKLKAFATDKLQLDEARATKFANAKLPHGFAALSLKAIRNILPFLRQGFIYAHAVLLAKIPDIVTAAVWDDADKREQILSGLLEVIENYNPDDRGIEGTIDFCIKSHLQDVVDLRPGAADALYHPSMIEAYPDAKLNKMGVFQLGSPRTNAIRNPMAMRSLHILRSVVNLLLRDGMLS

SEQ ID NO: 621 - protein, 1424 aa, Prevotella sp.
MTQKVLGLDLGTNSIGSAVRNLDLSDDLQWQLEFFSSDIFRSSVNKESNGREYSLAAQRSAHRRSRGLNEVRRRRLWATLNLLIKHGFCPMSSESLMRWCTYDKRKGLFREYPIDDKDFNAWILLDFNGDGRPDYSSPYQLRRELVTRQFDFEQPIERYKLGRALYHIAQHRGFKSSKGETLSQQETNSKPSSTDEIPDVAGAMKASEEKLSKGLSTYMKEHNLLTVGAAFAQLEDEGVRVRNNNDYRAIRSQFQHEIETIFKFQQGLSVESELYERLISEKKNVGTIFYKRPLRSQRGNVGKCTLERSKPRCAIGHPLFEKFRAWTLINNIKVRMSVDTLDEQLPMKLRLDLYNECFLAFVRTEFKFEDIRKYLEKRLGIHFSYNDKTINYKDSTSVAGCPITARFRKMLGEEWESFRVEGQKERQAHSKNNISFHRVSYSIEDIWHFCYDAEEPEAVLAFAQETLRLERKKAEELVRIWSAMPQGYAMLSQKAIRNINKILMLGLKYSDAVILAKVPELVDVSDEELLSIAKDYYLVEAQVNYDKRINSIVNGLIAKYKSVSEEYRFADHNYEYLLDESDEKDIIRQIENSLGARRWSLMDANEQTDILQKVRDRYQDFFRSHERKFVESPKLGESFENYLTKKFPMVEREQWKKLYHPSQITIYRPVSVGKDRSVLRLGNPDIGAIKNPTVLRVLNTLRRRVNQLLDDGVISPDETRVVVETARELNDANRKWALDTYNRIRHDENEKIKKILEEFYPKRDGISTDDIDKARYVIDQREVDYFTGSKTYNKDIKKYKFWLEQGGQCMYTGRTINLSNLFDPNAFDIEHTIPESLSFDSSDMNLTLCDAHYNRFIKKNHIPTDMPNYDKAITIDGKEYPAITSQLQRWVERVERLNRNVEYWKGQARRAQNKDRKDQCMREMHLWKMELEYWKKKLERFTVTEVTDGFKNSQLVDTRVITRHAVLYLKSIFPHVDVQRGDVTAKFRKILGIQSVDEKKDRSLHSHHAIDATTLTIIPVSAKRDRMLELFAKIEEINKMLSFSGSEDRTGLIQELEGLKNKLQMEVKVCRIGHNVSEIGTFINDNIIVNHHIKNQALTPVRRRLRKKGYIVGGVDNPRWQTGDALRGEIHKASYYGAITQFAKDDEGKVLMKEGRPQVNPTIKFVIRRELKYKKSAADSGFASWDDLGKAIVDKELFALMKGQFPAETSFKDACEQGIYMIKKGKNGMPDIKLHHIRHVRCEAPQSGLKIKEQTYKSEKEYKRYFYAAVGDLYAMCCYTNGKIREFRIYSLYDVSCHRKSDIEDIPEFITDKKGNRLMLDYKLRTGDMILLYKDNPAELYDLDNVNLSRRLYKINRFESQSNLVLMTHHLSTSKERGRSLGKTVDYQNLPESIRSSVKSLNFLIMGENRDFVIKNGKIIFNHR

SEQ ID NO: 622 - protein, 241 aa, Prevotella sp.
QAVKEKIKEAIAGKNFKTAIAEPIFMNKEKGIRINKVRYYVKAQERLKIRQQRDLSSKEYKQFFCVENESNYLLAIYEGELKGKKERDFCVVNNLDSAACLKRSNKGKAAPLVPERSEERNLPLLAVLKRGTQVLFYENSPEEILFDNPQDLVRRLYKVTGINTKKDVKNGKTYLYGNIELRFHQNAQKKDDVKMQSGVYKNNEVLRQGIVLSHKQFKALVEGVDFEFNVLGEIKKKERHA

SEQ ID NO: 623 - protein, 1216 aa, Prevotella stercorea
MTKILGIDTGTNSLGWAIVDKTADNYNLLDKGVNIFQEGVKIEKGIESSKAAERTEHRATRVRYYRIKLRKIRLLRILSDNHLCPPLSQEELSTWRLKKVYPKNELFMQWQRTDDDTEKTPYAYRHKCIHEKLDLSDVTDRYILGRAFYHIIQRRGFLSNRKEQGGEDSGKVKEGISTLTHEMNEAGYEYLGDYFYALYNKGEKIRKHYTARNEHFLSEFKAICEKQDLEKELGSEVVRNIEKAIFDQRPLKSQKGQVGKCVFEKNKTKCPSSHPMYEEFRMLTFINNIKIKTPNDDVLRPLNTGEREKIMPLFFRKSKKQFDFEDITKKLAPKKMYGFYKKEEDAEMPFLFNYPMDTSVSGCPVTAALKDVFGDDWITAICETYTLGEGKSRFDIVNDIWHALYFYSDKDKLAEFAINRLQLSEDEAKIFSEISLPADYASLSLKAICKILPYLRRGLIYSHAVFLGNLCEVMPKYEWSIKEMRETIIDNIIMEMDKCDTKDKRTFEVCIKDYLKGQYNVSDNSLKKLYHPSMIETYPRVQYTNEHGVYQLGSPRIDSVRNPMAMRSMFRLRKLVNRLLVEGKIDQNTEVHIEFARELNDANKRNAIALFVKENQSANDEARKQIITLFKKETGTDIEPTDKDILKYVLWEEQNHICLYTGKQIRISDFIGANPKFDIEHTIPRSVGGDSTKMNLTLCDSRFNREVKKTKLPVELPNHDEIMERIKEWKKNYELLDIQIRKNKKLSKGATTKEQKDTIIRKRHLLELRRDYWRGKYERFTMESVPEGFSRRQGTDISVISKYARLYLKSLFNRVYTVKGIATSDFRKIWGIQDIYSKKERINHVHHCIDAIVIACIGLDEYNKLGAYYHDEENNKWYGMSKASFKKPWATFVEDIKKIQDEILVYHYTPDNMPKQGRRRIKIDGKKILCKGDAARGSLHNDTYYGAIENDGAVKYVKRIDLASLEEKDVKNIVDDTVRSIIEAAIKEKGFKDAMASTIWMNEEKRVPIKKVRCFTPSITKPLNIRKQRDVSIKEYKQQYHVANDSNYLLALYIGTDNKGKEKREFEIVNILQAAQYYRTSNDKEVVDRHIVPIKSEHDYPFAYTLKIGTMVLLYEKSPNEVWDATIKERNRRLYKVTGLSTMRMKGRNGEYAYATVKLIHNEEARPSKDIKAKNGEYEQGEEFRPAIIMLHTQLNALVQGYDFEINELGEIRRLR

SEQ ID NO: 624 - protein, 1487 aa, Prevotella timonensis; identical to SEQ ID NO: 135

SEQ ID NO: 625 - protein, 770 aa, Pseudoramibacter alactolyticus
MAKGYFASDEEIDFSGVDDGFKNTLSSHQKFKEIFDVEVLNDWQKSMSEKIIFWATVYGDSKKFLKERLEDAYGNELDQKQIKRILGLRFKDWGRLSEAFLNLEGKNSKTNQSQTIIEALWNGDGTNNFNLMELLSSQFTYRDTLKKRALKGEKTLTNITYEDLSDLYLSPSVRRMVWQTILIVKELRQVLGAGPAKIFIEMARDVTLKAGTRTTSRRQQLLDLYKNVQTESRNWVEEIETQEESRFRSKKIFLYYTQMGQCMYTGEPIVFKDLFNRNLYDIDHIYPRHFVKDDSLINNLVLVKKQANSHKSDTFPIENSIQQARRDFWKWLSEKGLISREKFNRLTRRTSFSDEELAGFISRQIVETRQGTKAVAQIFENALPDSEVVYVKAGNVSDFRHHFNLLKCREINDLHHAQDAYLNVVVGNVYHTKFTKNPINFIKGYRKDRKAYAYHMDQIFDHPVKRNDIIAWQTDKNQSIATVKKVMAKGTPLVTRMSYEEHGELSNQNICSAKAAQKAEGKGYLPIKNSERLSNTQRYGGYNKYAGSYFFLVEHTLKKNRVRTIETMPLFLRDTIKTSKDLLKYCCESLKLEAPSIRVMKIKMGSLLSVNGAFVYLTGRSGKKLITPNGFQLILPQKWQDYIRLLIKTKDSPDDVEGISGGKNIEFYDILVEKHTKTCLKNRPNPIGEKLREWRNDFIALDNQKQSDILLEILKLTTFDNSGADLRAIGGKNQSGVSTIGKKISSQKSVVLVHRSVTGIFEKQVDLLSI

SEQ ID NO: 626 - protein, 103 aa, Rhizobium etli
MSGEQLTREIGRSGVKASAVGLGTWAIGGWMWGGTDEAQSIAAIQASLDAGVTLIDTAPAYGLGRSEEIVGKALAGRRDKAVIATKCGLVWHTQKGNHFFDQD

SEQ ID NO: 627 - protein, 1059 aa, Rhodovulum sp.
MGIRFAFDLGTNSIGWAVWRTGPGVFGEDTAASLDGSGVLIFKDGRNPKDGQSLATMRRVPRQSRKRRDRFVLRRRDLLAALRKAGLFPVDVEEGRRLAATDPYHLRAKALDESLTPHEMGRVIFHLNQRRGFRSNRKADRQDREKGKIAEGSKRLAETLAATNCRTLGEFLWSRHRGTPRTRSPTRIRMEGEGAKALYAFYPTREMVRAEFERLWTAQSRFAPDLLTPERHEEIAGILFRQRDLAPPKIGCCTFEPSERRLPRALPSVEARGIYERLAHLRITTGPVSDRGLTRPERDVLASALLAGKSLTFKAVRKTLKILPHALVNFEEAGEKGLDGALTAKLLSKPDHYGAAWHGLSFAEKDTFVGKLLDEADEERLIRRLVTENRLSEDAARRCASIPLADGYGRLGRTANTEILAALVEETDETGTVVTYAEAVRRAGERTGRNWHHSDERDGVILDRLPYYGEILQRHVVPGSGEPEEKNEAARWGRLANPTVHIGLNQLRKVVNRLIAAHGRPDQIVVELARELKLNREQKERLDRENRKNREENERRTAILAEHGQRDTAENKIRLRLFEEQARANAGIALCPYTGRAIGIAELFTSEVEIDHILPVSLTLDDSLANRVLCRREANREKRRQTPFQAFGATPAWNDIVARAAKLPPNKRWRFDPAALERFEREGGFLGRQLNETKYLSRLAKIYLGKICDPDRVYVTPGTLTGLLRARWGLNSILSDSNFKNRSDHRHHAVDAVVIGVLTRGMIQRIAHDAARAEDQDLDRVFRDVPVPFEDFRDHVRERVSTITVAVKPEHGKGGALHEDTSYGLVPDTDPNAALGNLVVRKPIRSLTAGEVDRVRDRALRARLGALAAPFRDESGRVRDAKGLAQALEAFGAENGIRRVRILKPDASVVTIADRRTGVPYRAVAPGENHHVDIVQMRDGSWRGFAASVFEVNRPGWRPEWEVKKLGGKLVMRLHKGDMVELSDKDGQRRVKVVQQIEISANRVRLSPHNDGGKLQDRHADADDPFRWDLATIPLLKDRGCVAVRVDPIGVVTLRRSNV

SEQ ID NO: 628 - protein, 1405 aa, Riemerella anatipestifer
MKTILGLDLGTNSIGWALVKEAENSNEKSEIIKLGVRVNPLTVDEKTNFEAGRPLSTNADRTAKRSARRNLQRYKLRRKNLIDLLIKNQLIDKDTPLTEIGKNTTHQTLELRAKAARERIELEDLARVFLAINKKRGYRSSRKVNNEEEGQAVDGMAVAKKLYDENLTPGQYAYELLSKGKKYVPDFYRSDLQAEFNAIWEYQKQFYADILDDELYNALKGQGQQNSRKRFLAIKGVYTAENKGKRDDVKLRHYKWRSEAISKKINIEEVAYVLVEINNDLNKSSGYLGAISDRSKELYFNKETVGENLWKQIQKNPHTSLKNQVFYRQDYLDEFEQIWETQAQFHPQLTLALKEQIRDVIIFYQRKLKSQKGLLSFCQFESWEIERKDENGNVILNKTTQLPKRQTVGRRVAPKSSPLFQEFKIWQNINNLEVTKISEGASKNKKETETLSDDERKLLFEELNLRGNLSQKEVLQILGLKDKEYKTNFSEGLEGNRTNAALFNIYQQIAENEGYGFDWSKKSAQEIKEELKAVFPQIGIQADILDFNANLDGKEFENQASYQLWHLLYSAEEDDKINEEDQIIYGNSAVSLKKKLCEKFGFTPEYAKWIANVSLQDDYGNLSTKAMRKIIPYLIDGNDYSEACALAGYNHSNSLTKEENDNRELLDKLELLPKNSLRNPVVEKILNQMVNVVNQVIETYGKPDEVRIELARELKKSAEKRAEMTKSINEATRRNEDIKKLITKDFGIPNPTKSDVVRYRLWEELAPLAYKDVFTGKQIKKEDLFSSKIDIEHIIPKALLFDDSFSNKTLVFRETNLKKADRTAYDFIESDYNATLDDYIQRVETLYNNTKGTISKGKRNKLLMAQKNLPDGFIERDLRNSQYIAKKAKAMLYQVFKDVNVTSGSITDRLREDWDLINVMKELNFPKYKALGLTEIEERYDIGQEKTKRVEVITDWTKRNDHRHHAMNALTVAFTTSSHIQYLNYLNARKNESHKEHKNIKGIENKITHKQKDKRKFIPPMPNFREEAKKHIETILVSIKNKNKVYTKNINKTKKKSGHNTKEQLTPRGQLHKETVYGKSKRPMSKPTKINKNFSLEQAQLIINVQEKELVLRHLAQFDNNPAVAFDTKTLKKMPLLKNGEPLKEVLCFEEIFTIRKDITPDLKIEKVVDEKIKAILEQRKKDFGGNAKEAFSDLDKNPIWLNKKKGICIKRVTITGVSNAEALHHQKDHLGREILDDNGNPIPADFVSTGNNHHLAVYLDSEGKLQDNIVSFYEAVVRTSQGLPVVDKGLNKDLGWKFLFSLKQNEMFVFPNDDFDINDFDLLDDKKAELISKHLYRVQKISKVSAGNSFVRDIVFRHHLETTVKEVKELKDISYIQLKSLEGLRNIKKVRINHIGKIVQVGEY

SEQ ID NO: 629 - protein, 1145 aa, Riemerella anatipestifer
MKTILGLDLGTNSIGWALVKETENSNEKSEIIKLGVRVNPLTVDEKTNFEAGRPLSTNADRTAKRSARRNLQRYKLRRKNLIDLLIKHRLIDKDTPLTEIGKNTTHQTLELRAKAARERIELEDLARVFLAINKKRGYRSSRKVNNEEEGQVVDGMAVAKKLYDENLTPGQYAYELLSKGKKYVPDFYRSDLQAEFDSIWEYQKQFYADILDDELYNALKGQGQQNSRKRFLAIKGVYTAENKGKRDEVKLQHYKWRSEAITQKLSIEEVAYVLVEINNDLNKSSGYLGAISDRSKELYFNKETVGENLWKQIQKNPHTSLKNQVFYRQDYLDEFEQIWETQAQFHPQLTLALKEQIRDVVIFYQRKLKSQKGLLSFCQFESWEIERKDENGNVILNKTTQLPKRQTVGRRVAPKSSPLFQEFKIWQNINNLEIAKISDGNSKNKKETEALSDDERKLLFEELNLRGNLSQKEVLQILGLKDKEYKTNFPEGLEGNRTNAALFNIYQQIAENEGYGDWTKKSAQEIKEELKAVFPQIGIQADILDFNAELDGKEFENQASYQLWHLLYSAEEDDKINEEDQIIYGNSAVSLKKKLCEKFGFTPEYAKWIANVSLQDDYGNLSTKAMRKIIPYLIDGNDYSEACALAGYNHSNSLTKEENDNRERLNKLELLPKNSLRNPVVEKILNQMVNVVNQVIETYGKPDEVRIELARELKKSAEERAEMTKGINEATRRNEDIKKLITKNFGIPNPTKNDVVRYRLWEELAPLAYKDVFTGRQIKKEDLFSSKIDIEHIIPKALLFDDSFSNKTLAFRETNLKKADRTAYGFIESDYNATLDDYIQRVETLYNNAKGTISKGKRNKLLMAQKNLPDGFIERDLRNSQYIAKKAKSMIEKVFNDVNVTSGSITDRLREDWDLINVMKELNFPKYKALGLTEIEERYDIGQEKTKKVEVITDWTKRNDHRHHAMDALTVAFTTKSHVQYLNNLNTIHSLKGDEVDLELSKLYGLKNTITEVVNKKRKFIPPMPNFREEAKKHIETILVSIKNKNKVYTKNINKTKKESGYHTKEQLTPRGQLHKETVYGKSKRPMNKPTKINKNFSLEQAQLIINVQEKELVLRHLAQFDNNPAVAFDTKTLKKCHYLKMVNL

SEQ ID NO: 630 - protein, 1400 aa, Riemerella anatipestifer
MKTILGLDLGTNSIGWALVKETENSNEKSEIIKLGVRVNPLTVDEKTNFEAGRPLSTNADRTAKRSARRNLQRYKLRRKNLIDLLIKHRLIDKDTPLTEIGKNTTHQTLELRAKAARERIELEDLARVFLAINKKRGYRSSRKVNNEEEGQVVDGMAVAKKLYDENLTPGQYAYELLSKGKKYVPDFYRSDLQAEFDSIWEYQKQFYADILDDELYNALKGQGQQNSRKRFLAIKGVYTAENKGKRDEVKLQHYKWRSEAITQKLSIEEVAYVLVEINNDLNKSSGYLGAISDRSKELYFNKETVGENLWKQIQKNPHTSLKNQVFYRQDYLDEFEQIWETQAQFHPQLTLALKEQIRDVVIFYQRKLKSQKGLLSFCQFESWEIERKDENGNVILNKTTQLPKRQTVGRRVAPKSSPLFQEFKIWQNINNLEIAKISDGNSKNKKETEALSDDERKLLFEELNLRGNLSQKEVLQILGLKDKEYKTNFPEGLEGNRTNAALFNIYQQIAENEGYGDWTKKSAQEIKEELKAVFPQIGIQADILDFNAELDGKEFENQASYQLWHLLYSAEEDDKINEEDQIIYGNSAVSLKKKLCEKFGFTPEYAKWIANVSLQDDYGNLSTKAMRKIIPYLIDGNDYSEACALAGYNHSNSLTKEENDNRERLNKLELLPKNSLRNPVVEKILNQMVNVVNQVIETYGKPDEVRIELARELKKSAEERAEMTKGINEATRRNEDIKKLITKNFGIPNPTKNDVVRYRLWEELAPLAYKDVFTGRQIKKEDLFSSKIDIEHIIPKALLFDDSFSNKTLAFRETNLKKADRTAYGFIESDYNATLDDYIQRVETLYNNAKGTISKGKRNKLLMAQKNLPDGFIERDLRNSQYIAKKAKSMIEKVFNDVNVTSGSITDRLREDWDLINVMKELNFPKYKALGLTEIEERYDIGQEKTKKVEVITDWTKRNDHRHHAMDALTVAFTTKSHVQYLNNLNTIHSLKGDEVDLELSKLYGLKNTITEVVNKKRKFIPPMPNFREEAKKHIETILVSIKNKNKVYTKNINKTKKESGYHTKEQLTPRGQLHKETVYGKSKRPMNKPTKINKNFSLEQAQLIINVQEKELVLRHLAQFDNNPAVAFDTKTLKKMPLLKNGEPLKEVLCFEEIFTIRKDITPDLKIEKVVDEKIKAILEQRKKDFGGNAKEAFSDLDKNPIWLNKEKGICIKRVTITGVSNAEALHHQKDHLGREILDDNGNPIPADFVSTGNNHHVAIYEDEKGKLQEKVVSLYEAVARANQGLPVVDKGLNEDLGWKFLFTMKQNEMFVFPNDDFDVNDIDLLDENNAKIISQHLFRVQKLATKNYMFRHHLETNVQEVKELNDIAYKSIRSTEPLKNIKKVRINHIGKIVQVGEY

SEQ ID NO: 631 - protein, 1128 aa, Roseburia intestinalis
MDEKMDYRIGLDIGIASVGWAVLQNNSDDEPVRIVDLGVRIFDTAEIPKTGESLAGPRRAARTTRRRLRRRKHRLDRIKWLFENQGLINIDDFLKRYNMAGLPDVYQLRYEALDRKLTDEELAQVLLHIAKHRGFRSTRKAETAAKENGAVLKATDENQKRMQEKGYRTVGEMIYLDEAFRIGCSWSEKGYILTPRNKAENYQHTMLRAMLVEEVKEIFSSQRRLGNKKATEELEEKYLEIMTSQRSFDLGPGMQPDGKPSPYAMEGFSDRVGKCTFLGDQGELRGAKGTYTAEYFVALQKINHTKLVNQDGETRNFTEEERRALTLLLFTQKEVKYAAVRKKLGLPEDILFYNLNYKKAATKEEQQKENQNTEKAKFIGMPYYHDYKKCLEERVKYLTENEVRDLFDEIGMILTCYKNDDSRTERLAKLGLVPIEMEGLLAYTPTKFQHLSMKAMRNIIPFLEKGMTYDKACEEAGYDFKADSKGTKQKLLTGENVNQTINEITNPVVKRSVSQTVKVINAIIRTYGSPQAINIELAREMSKTFEERRKIKGDMEKRQKNNEDVKKQIQELGKLSPTGQDILKYRLWQEQQGICMYSGKTIPLEELFKPGYDIDHILPYSITFDDSFRNKVLVTSQENRQKGNRTPYEYMGNDEQRWNEFETRVKTTIRDYKKQQKLLKKHFSEEERSEFKERNLTDTKYITTVIYNMIRQNLEMAPLNRPEKKKQVRAVNGAITAYLRKRWGLPQKNRETDTHHAMDAVVIACCTDGMIQKISRYTKVRERCYSKGTEFVDAETGEIFRPEDYSRAEWDEIFGVHIPKPWETFRAELDVRMGDDPKGFLDTHSDVALELDYPEYIYENLRPIFVSRMPNHKVTGAAHADTIRSPRHFKDEGIVLTKTALTDLKLDKDGEIDGYYNPQSDLLLYEALKKQLLLYGNDAKKAFAQDFHKPKADGTEGPVVRKVKIQKKQTMGVFVDSGNGIAENGGMVRIDVFRVNGKYYFVPVYTADVVKKVLPNRASTANKPYSEWRTMEDKDFLFSLYSRDLVHIKSKKGIPIKNVDGSLGESKEVYAYYIGADISGAKIEGKAHDSRYTFRGIGVQKLELIEKCQVDILGHISTVKNEKRMGFS

SEQ ID NO: 632 - protein, 1471 aa, Scardovia wiggsiae
MGYKAPRNDKGEIDYGVGLDLGNGSVGWVAMDKDYHLIRARGHELIGARLFDPANSAENRRESRTTRRRLSRRRWRLRMLDSLFASELAKIDPNFLARRKYSWVHPKDEQNHENWYGSIIFGSKEQDKQFYKDYPTIYHLRKKLTEDTERHDIREIYVAIHHIVKYRGHFLREGEINSENLFDPEGFVELIKDVIKLNNSYDESTPIFEASPADVSEALLNEHTSRSGRIEDTLDKLDFSVSRVDKHELKGMRDAAKAVIGAIVGNTADFSKIFNLDNLDKDSKDNLKLKFADSNFDEKYGGVVGSGLLDETQIELVDRIHAVYDAVALKGILGDAHTISEAKVESYEKHRKNWKLIKEELRTKENKDEVDLWYGDLSGRQYKNPPDPEKGPDEGSKKDSPIRDSDQKQNLIKKANDYFTELIDDSQLSEEQKNCLKNDINNGQLFPVQRSSDNGVIPYQIHLNELRRIIENQKQYYPFLAETFIRKTAEGKSYEENKIVALLKFRVPYYVGPLVSKEDMEEHSSGNSAYHWMARNPGRGEAITPWNFDEVVDKDESGARFISRLTGTDTYLLGEPTLPQHSLLYEEYMVLSELNNVRLNVRQGNHWSDKNRQRLSYKQKEFLIENLFKEHKTVTRKRAEDCLSSMGCGEVQLFGLSDEKKFASSLSSYITLKKILGKAFVDDSGNSAILERIIEVQTVFEDREPLTHQLSLIDSLTVEQRKQLAKIHYTGWGKLSRKLLTSKKGSYKIHSQNEIMRTQHSIIDIMRGDSLNLIEIIRDKKIGIGEWIDNENLDRETGESDVSRLESVFEGIVMSPRVKRGVVQAVRVIDDLAKAIGNPPQRIFIEMADEVQASQRTVSRLSRLKALYGSPSLQKEFNDLKDLRKSLNETKDADLQEDRLYLYYIQLGKDLYTGKEISIDSLSSAYDIDHIVPQALTQDDSIDNRVLVSRKENARKTDSYLYTPDLIKNMRPLWGKLLAAGLMSQKKYDALTRVDDFKDREKQRFVQRSLVETRQIMKNVSTILRTYYGEDTNVVTLKSSITHDMRKYLGFPYKNRDINDYHHAQDALCISAAGQFMLNRHFVSGGEVTDGASNAYNMYLAEYLQEFRDAKARGERKRSTAFGFVVGSMSSKDDEKRTDHRTGEIVWSETNAEYLRKVMNYKKMLITQKVGDVKTRALYDETRYGHKESSAKSIKFDNLRRDTSLYGGFSGASTAYMMLVEYKKKNKLVSITAQEASLLAVADQKNDTVSVMDGILASHGLSGAKILLPKIVTGQLLDYSDALVTLQSASELNTARQMWLPRNDYNDIDIILKSKDIEDAAHKLGYDSDTVHVLRRIQKLFEAVFRVAESQFPLHQLSKDQQEEILRDPQNYGFGSAVKLLGGLLKALHANAENTNLAGLVKVLHGDKEYSDDGKAKEFKKFGFSPRWRRISNPTGFTLSDSDTFIYQSPSGIFEQRVTVKELKEKADKQK

SEQ ID NO: 633 - protein, 116 aa, Sphingobacterium spiritivorum
MFRKYFEEKNSARLLFTLKQGDFVYVPDDNEEVILDESSPLFIDYWKNISERSNNIHVVQKFSGKEIYFLKHTIADTIAKKIEFGSQDCYQSLNGKSIKEFCIKIDSDRLGNISKV

SEQ ID NO: 634 - protein, 1306 aa, Sphingobacterium spiritivorum; identical to SEQ ID NO: 98

SEQ ID NO: 635 - protein, 1110 aa, Sphingobium sp.
MAEGKKRIWRLGADLGANSLGWAAIELSAPVNGKPIAILAAGSRIFSDGRDPKSGASLAVDRRDARAMRRRRDRFKQRQKALIKYLIADGLFPADEAARNAMAAIDPYAVRARALDEALSLPELGRALFHLNQRRGFKSNRKADRKADDDAGKIAIGIDRTRDAIAEDEADAGAEPGSWTFGKWLHERRLKGQSVRTRLRPESGEDAKGDGYDFYPDRALMEEEFDAIWAAQAPHHPDVLTNDVHDRLHEIIFYQRPLKAPQVGMCSLIPGDRRLPKAHPLFQRRRLLEELNALMIVRPGEVAQRLTREERDILLLKLKDKNKVSFATLRKALKLDPDARFNKESEDRTDLKGDEVAAVMGSKTRFGNLWVHLSIEAQWDVLARLDAVESDAEDAAFCAWLVETYALTPEQARAVANAPLPPGYGRFGETATRKLIEALRDGKKDDRVLVYSEAVTEAGLGHHSDRRTGEVFEDAKGRPQLPYYGVALERHIMPGTGDPSDPEEMRVGRLTNPTVHIGLNQLRRILNVLIRAYGPPAEIAIELARELKLTDEDKKRINRENNDNRIAAERRSEKLLAIGQADSGANRALLKLWEELNPANVLDRRCIYSGRQISIDMLFSAAVEVDHILPFAATLDDSNGNKIVCLREANREKRKRSPHDAWGHSARWDEIAARAAQLPRNKRWRFEPDAMDKFRDEGGFQARHLVDTQYLARLSREYLATLYPEKGEGSGHIWVSPGRLTEMVRRKLGLNDLLPDHNFGGGADQAKNRLDHRHHAIDAVVVAIVDRGMLNAIARASGQEGAEGRERIIIPEPWDGFRDALRETVNRITVSHRTDHGTASKAGLPKGKDATAGRLHNDTAYGFTGDTDAKGNSIVVRRVPLSSFKKLADLDRIRDADLKAALYQHLNGLEGKAFEKALAEFHKLEWHNFGGVRRVRVTEPLTVIPIKDRNGRIYKGYKGDSNYRYDVWELPDGKWVTNWKNEAGEAMSSVISMFDAHQSSEPPRPHPAARKILSLHQNDLLAIEREGEDRKLMRVVKFGQSGQITLAEHQQAGDLKKRDAVSNDDDPFKYFAPTSGGLKKVKARQVRIDEIGRVLDPGFPARTARRKTRG

SEQ ID NO: 636 - protein, 1084 aa, Sporolactobacillus vineae
MKYSIGLDIGISSVGWSVINLDRERIELMGARLFDAAENPKNGSSLAAPRRDARSARRRLRRRRYRVGRVRHFIIDRGLVTRGQADQLFDWKDGDLDIWLVRVNALERLLTDREFARVLIHIAKNRGYRSNRKSEAKSGENGQVLSAIKANKELMEEKGYQTVAEMLVNEPETFAGRKRNRGGEYTHVIARSELEHEIRLIFTKQRAFGNRFATEENENTYVKIWAAQRPVATKDDILKKIGDCTFEKGEKRAPKASYAFQYFRALDKLNRLRILSVREPSRNLTDDERNLIVPALFNHDKQKYSDLRKILQLRDDQKFNELFYDPGKSLKENENKTFLSLAEQYKIRKVIRDVQGKDGLLQYRPLDIDTIAYALTVFKDDQDTRDYLSNTFVNGNGKQVLNLANRAFDAELIDGLLSLSFAKFGHLSLKALHKLIPHMEQGLSYYDACKKVGYHDNEQVGKSKQHLLPVIPADEIRNPVVVRSLSQTRKVINAIIKRYGSPTFMYIELAREMGRPYNERRDLEKQYNKNRTVNDSAIEQIHELYPEIGAPRGHDILKYKLWQQQDCKCAYSLEKIPAEKIFEPGYAEVDHIIPYSRSFDDSNSNKVLVLSRMNQEKKNRTPYEWFGGDEHRWNKFESYVNALKVNRKKKSLLTKKNMDTEEEDTFKSRHLNDTRYITRFIKSFVEDNLLFREIEGAKQHVFTVNGAYTSLMRKRWGFNKNREESDLHHSVDAVIIAVSQPFRNEVSRYFKHREISLPQLLKRTWDYFPEPWEGFVKELRARTLQDPEKLKLALESLDLDSYDPEFIDEVKPIFISRMPKRSIKGQIHDETLRRNRGKTKDGFVKIVTRTRLENIKFDKNGDFPMYGRESDPKTYQAIKQRYLENNKDKKKAFIEPLYKPAKNPNNASLIRSVKIEDKANQIVPLRDEAVAYNASIVRTEVYRNKETGKFYLAPVYVSDVFAGREPRRFIRANVPYEQWVNITDKFTFLFNLYPNDVIYIKMKKVKTTKSNINKTISWQESYFYFKGTDIHTGAITIIDHMNSFTDRVGTQGLQLFEKYQVDPLGNLSRVHGETQYGVPALSHS

SEQ ID NO: 637 - protein, 475 aa, Staphylococcus massiliensis
MGQDYILGLDIGITSVGYGLIDYHDKSVIDAGVRLFKEANVENNEGRRSKRGSRRLQRRRKHRLARTRNLLESYQLNPFPKCEKNPYEIRVKGFKEVLTSDELSAALLHLAKRRGIDNVHVTDTESDSSDNGLSTKEQLAKNQKALESRYVCELQLERLLNDNKVRGANNRFKTQDFVREAKQILSIQKDHHNLDQVFIDKYISLLETRREYYEGPGKGSPYGWDGDIKKWYELLMGRCTYFPESLRSVKYAYSADLFNALNDLNNLVIVRDENDKLTYPEKYHIVENVFKQRKKPTLKQIAKEIDVAPEDIRGYRVTASGTPVFTSFKLYHDIKSVTSNDKVLEDTELLDAIAEVLTIYQSPIEVQEKLESLNVILTKEEIEGISKLTGYTGTHALSLKAIQIVIDELWETNDNQMTIFTRLNMKPQKVDLAKANKIPTSLVEDFIISPVAKRAFIQSIKVINAVIKNMVCLKI

SEQ ID NO: 638 - protein, 581 aa, Staphylococcus massiliensis
MPKDIIIELAREKNSDEERKIIRDVQKRNQQTRDLVDKVIKETGKTKAKGMVEKLILHDKQEGKCLYSLKSIPLEDLLNNPHHYEVDHIIPRSVSYDNSMNNKVLVLQEENSKKSNQTPFQYFNSSNTHITFKQFKQHVLNLSKTKDRITKKKKEYLLEERDINKFSVQKEFINRNLVDTRYATRELMTLLRAYFSANELDVKVKAINGGFTSYLRKRWDFKKDRNAGYKHHAEDALIIANVDFIFKQLKALDNAKKVMEGRKVQVEKDNVEDNEHYESLFREPDQIKEIKLYDNYKFSHRVDKKPNRELINDTIYSTRKVDNKTYTIQTVNNIYDKQNDQLKKLFNKSPEKFLMYKHDPKTFDKLATIMRQYKNEKNPLYKFHDETGEYLTKYAKKDNGPIVKSLKYIGKQVNAHLDITNDYENSNNKVVKLSLKPFRFDVYLDDGKYKFVTVKYLDIIKKDTYYVIDEEKYKLALQQKKISENAKFIGSFYNNDLIKINGELLRVIGVNDDAKNTLELNMIDISYRDYVENMNLATTPRIRKNIGKSITILEKYTTDILGNTFKISSPEKPQFIFKVRD

SEQ ID NO: 639 - protein, 1334 aa, Staphylococcus pseudintermedius; identical to SEQ ID NO: 205

SEQ ID NO: 640 - protein, 1112 aa, Staphylococcus simulans; identical to SEQ ID NO: 252

SEQ ID NO: 641 - protein, 773 aa, Streptococcus agalactiae
MNKPYSIGLDIGTNSVGWSIITDDYKVPAKKMRVLGNTDKEYIKKNLIGALLFDGGNTAADRRLKRTARRRYTRRRNRILYLQEIFAEEMSKVDDSFFHRLEDSFLVEEDKRGSKYPIFATLQEEKDYHEKFSTIYHLRKELADKKEKADLRLIYIALAHIIKFRGHFLIEDDSFDVRNTDISKQYQDFLEIFNTTFENNDLLSQNVDVEAILTDKISKSAKKDRILAQYPNQKSTGIFAEFLKLIVGNQADFKKYFNLEDKTPLQFAKDSYDEDLENLLGQIGDEFADLFSAAKKLYDSVLLSGILTVIDLSTKAPLSASMIQRYDEHREDLKQLKQFVKASLPEKYQEIFADSSKDGYAGYIEGKTNQEAFYKYLSKLLTKQEDSENFLEKIKNEDFLRKQRTFDNGSIPHQVHLTELKAIIRRQSEYYPFLKENQDRIEKILTFRIPYYIGPLAREKSDFAWMTRKTDDSIRPWNFEDLVDKEKSAEAFIHRMTNNDFYLPEEKVLPKHSLIYEKFTVYNELTKVRYKNEQGETYFFDSNIKQEIFDGVFKEHRKVSKKKLLDFLAKEYEEFRIVDVIGLDKENKAFNASLGTYHDLEKILDKDFLDNPDNESILEDIVQTLTLFEDREMIKKRLENYKDLFTESQLKKLYRRHYTGWGRLSAKLINGIRDKESQKTILDYLIDDGRSNRNFMQLINDDGLSFKSIISKAQAGSHSDNLKEVVGELAGSPAIKKGILQSLKIVDELVKVMGYEPEQIVVEMARENQTTNQ

SEQ ID NO: 642 - protein, 1370 aa, Streptococcus agalactiae
MNKPYSIGLDIGTNSVGWSIITDDYKVPAKKMRVLGNTDKEYIKKNLIGALLFDGGNTAADRRLKRTARRRYTRRRNRILYLQEIFAEEMSKVDDSFFHRLEDSFLVEEDKRGSKYPIFATMQEEKDYHEKFPTIYHLRKELADKKEKADLRLVYLALAHIIKFRGHFLIEDDRFDVRNTDIQKQYQAFLEIFDTSFENNHLLSQNVDVEAILTDKISKSAKKDRILAQYPNQKSTGIFAEFLKLIVGNQADFKKHFNLEDKTPLQFAKDSYDEDLENLLGQIGDEFADLFSAAKKLYDSVLLSGILTVTDLSTKAPLSASMIQRYDEHREDLKQLKQFVKASLPEKYQEIFADSSKDGYAGYIEGKTNQEAFYKYLSKLLTKQEDSEYFLEKIKNEDFLRKQRTFDNGSIPHQVHLTELKAIIRRQSEYYPFLKENQDKIEKILTFRIPYYVGPLARGNSDFAWMTRKTDDSIRPWNFEDLVDKEKSAEAFIHRMTNNDLYLPEEKVLPKHSLIYEKFTVYNELTKVRYKNEQGETYFFDSNVKQEIFDGVFKEHRKVSKKQLLDFLAKEFEEFRIVDVTGLDKENKAFNASLGTYHDLKKILDKDFLDNPDNESILEDIVQTITLFEDREMIKKRLENYKDLFTESQLKKLYRRHYTGWGRLSAKLINGIRDRESQKTILDYLISDGRANRNFMQLINDDGLSFKSIISKAQSGSHSDNLKEVVGELAGSPAIKKGILQSLKIVDELVKVMGYEPEQIVVEMARENQTTNQGRRNSRQRYKLLEDGVKNLASDLNGDILKEYPTDNQALQNERLFLYYLQNGRDMYTGEALDIDNLSQYDIDHIVPQAFIKDDSIDNRVLVSSAKNRGKSDDVPSIDIVKARKAFWKKLLDAKLISQRKYDNLTKAERGGLTPDDKAGFIQRQLVETRQITKHVARILDERFNNKVDDNNKPIRKVKIVTLKSNLVSNFRKEFGFYKIREVNNYHHAHDAYLNAVVAKAILTKYPQLEPEFVYGDYPKYNSYKTRKSATEKLFFYSNIMNFFKTKVTLADETVVVKDDIEVNNETGEIAWDKKKHFATVRKVLSYPQVNIVKKTEVQTGGFSKESILAHSNSDKLIPRKTKDIYLDPKKYGGFDSPIVAYSVLVLADIKKGKAQKLKTVKELIGITIMERERFEKNPSAFLESKGYLNIRTDKLIILPKYSLFELENGRRRLLASAGELQKGNELALPTQYMKFLYLASRYNESKGKPEEIEKKQEFVNQHVSYFDDILQLINDFSKRVILADANLEKINKLYSDNKDNTPVDELAKNIINLFTFTSLGAPAAFKFFDKSVDRKRYTSTKEVLDSTLIHQSITGLYETRIDLGKLGED

SEQ ID NO: 643 - protein, 1370 aa, Streptococcus agalactiae
MNKPYSIGLDIGTNSVGWSIITDDYKVPAKKMRVLGNTDKEYIKKNLIGALLFDGGNTAADRRLKRTARRRYTRRRNRILYLQEIFAEEMSKVDDSFFHRLEDSFLVEEDKRGSKYPIFATMQEEKDYHEKFPTIYHLRKELADKKEKADLRLVYLALAHIIKFRGHFLIEDDRFDVRNTDIQKQYQAFLEIFDTSFENNHLLSQNVDVEAILTDKISKSAKKDRILAQYPNQKSTGIFAEFLKLIVGNQADFKKHFNLEDKTPLQFAKDSYDEDLENLLGQIGDEFADLFSAAKKLYDSVLLSGILTVTDLSTKAPLSAYMIQRYDEHREDLKQLKQFVKASLPEKYQEIFADSSKDGYAGYIEGKTNQEAFYKYLSKLLTKQEDSEYFLEKIKNEDFLRKQRTFDNGSIPHQVHLTELKAIIRRQSEYYPFLKENQDKIEKILTFRIPYYVGPLARGNSDFAWMTRKTDDSIRPWNFEDLVDKEKSAEAFIHRMTNNDLYLPEEKVLPKHSLIYEKFTVYNELTKVRYKNEQGETYFFDSNVKQEIFDGVFKEHRKVSKKQLLDFLAKEFEEFRIVDVTGLDKENKAFNASLGTYHDLKKILDKDFLDNPDNESILEDIVQTITLFEDREMIKKRLENYKDLFTESQLKKLYRRHYTGWGRLSAKLINGIRDRESQKTILDYLISDGRANRNFMQLINDDGLSFKSIISKAQSGSHSDNLKEVVGELAGSPAIKKGILQSLKIVDELVKVMGYEPEQIVVEMARENQTTNQGRRNSRQRYKLLEDGVKNLASDLNGDILKEYPTDNQALQNERLFLYYLQNGRDMYTGEALDIDNLSQYDIDHIVPQAFIKDDSIDNRVLVSSAKNRGKSDDVPSIDIVKARKAFWKKLLDAKLISQRKYDNLTKAERGGLTPDDKAGFIQRQLVETRQITKHVARILDERFNNKVDDNNKPIRKVKIVTLKSNLVSNFRKEFGFYKIREVNNYHHAHDAYLNAVVAKAILTKYPQLEPEFVYGDYPKYNSYKTRKSATEKLFFYSNIMNFFKTKVTLADETVVVKDDIEVNNETGEIAWDKKKHFATVRKVLSYPQVNIVKKTEVQTGGFSKESILAHSNSDKLIPRKTKDIYLDPKKYGGFDSPIVAYSVLVLADIKKGKAQKLKTVKELIGITIMERERFEKNPSAFLESKGYLNIRTDKLIILPKYSLFELENGRRRLLASAGELQKGNELALPTQYMKFLYLASRYNESKGKPEEIEKKQEFVNQHISYFDDILQLINDFSKRVILADANLEKINKLYSDNKDNTPVDELAKNIINLFTFTSLGAPAAFKFFDKSVDRKRYTSTKEVLDSTLIHQSITGLYETRIDLGKLGED

SEQ ID NO: 644 - protein, 1378 aa, Streptococcus agalactiae
MNKPYSIGLDIGTNSVGWSIITDDYKVPAKKMRVLGNTDKEYIKKNLIGALLFDGGNTAADRRLKRTARRRYTRRRNRILYLQEIFAEEMSKVDDSFFHRLEDSFLVEEDKRGSKYPIFATMQEEKYYHEKFPTIYHLRKELADKKEKADLRLIYLALAHIIKFRGHFLIEDDRFDVRNTDIQKQYQAFLEIFDTTFENNDLLSQNVDVEAILTDKISKSAKKDRILARYPNQKSTGIFAEFLKLIVGNQADFKKHFNLEDKTPLQFAKDSYDEDLENLLGQIGDEFADLFSAAKKLYDSVLLSGILTVIDLSTKAPLSASMIQRYDEHHEDLKHLKQFVKASLPENYREVFADSSKDGYAGYIEGKTSQEAFYKYLLKLLTKQEGSEYLLEKIKNEDFLRKQRTFDNGSIPHQVHLTELRAIIRRQSEYYPFLKENLDRIEKILTFRIPYYVGPLAREKSDFAWMTRKTDDSIRPWNFEDLVDKEKSAEAFIHRMTNNDLYLPEEKVLPKHSLIYEKFTVYNELTKVRFLAEGFKDFQFLNRKQKETIFNSLFKEKRKVTEKDIISFLNKVDGYEGIAIKGIEKQFNASLSTYHDLKKILGKDFLDNTDNELILEDIIQTLTLFEDREMIKKRLDIYKDFFTESQLKKLYRRHYTGWGRLSAKLINGIRNKENQKTILDYLIDDGSANRNFMQLIKDAGLSFKPIIDKARTGSHSDNLKEVVGELAGSPAIKKGILQSLKIVDELVKVMGYEPEQIVVEMARENQTTAKGLSRSRQRLTTLRESLGNLKSNILEEKKPKYVKDQVENHHLSDDRLFLYYLQNGKDMYTDDELDIDNLSQYDIDHIIPQAFIKDDSIDNRVLVSSAKNRGKSDDVPSIEIVKARKMFWKNLLDAKLMSQRKYDNLTKAERGGLTSDDKARFIQRQLVETRQITKHVARILDERFNNELDSKGRRIRKVKIVTLKSNLVSNFRKEFGFYKIREVNNYHHAHDAYLNAVVAKAILTKYPQLEPEFVYGLYRRKKLSKIVREDKEEKYSEATRKMFFYSNLMNMFKRVVRLADGSIVVRPVIETGRYMGKTAWDKKKHFATVRKVLSYPQNNIVKKTEIQTGGFSKESILAHGNSDKLIPRKTKDIYLDPKKYGGFDSPIVAYSVLVVADIKKGKAQKLKTVTELLGITIMERSRFEKNTSAFLESKGYLNIRDDKLMILPKYSLFELENGRRRLLASAGELQKGNELALPTQFMKFLYLASRYNESKGKPEEIEKKQEFVNQHVSYFDDILQLINDFSNRVILADANLEKINKLYQDNKENIPVDELANNIINLFTFTSLGAPAAFKFFDKIVDRKRYTSTKEVLNSTLIHQSITGLYETRIDLGKLGEG

SEQ ID NO: 645 - protein, 1370 aa, Streptococcus agalactiae
MNKPYSIGLDIGTNSVGWSIITDDYKVPAKKMRVLGNTDKEYIKKNLIGALLFDGGNTAADRRLKRTARRRYTRRRNRILYLQEIFAEEMSKVDDSFFHRLEDSFLVEEDKRGSKYPIFATMQEEKYYHEKFPTIYHLRKELADKKEKADLRLIYLALAHIIKFRGHFLIEDDRFDVRNTDIQKQYQAFLEIFDTTFENNDLLSQNVDVEAILTDKISKSAKKDRILARYPNQKSTGIFAEFLKLIVGNQADFKKHFNLEDKTPLQFAKDSYDEDLENLLGQIGDEFADLFSAAKKLYDSVLLSGILTVTDLSTKAPLSASMIQRYDEHREDLKQLKQFVKASLPEKYQEIFADSSKDGYAGYIEGKTNQEAFYKYLSKLLTKQEGSEYLLEKIKNEDFLRKQRTFDNGSIPHQVHLTELRAIIRRQSEYYPFLKENLDRIEKILTFRIPYYVGPLAREKSDFAWMTRKTDDSIRPWNFEDLVDKEKSAEAFIHRMTNNDLYLPEEKVLPKHSLIYEKFTVYNELTKVRFLAEGFKDFQFLNRKQKETIFNSLFKEKRKVTEKDIISFLNKVDGYEGIAIKGIEKQFNASLSTYHDLKKILGKDFLDNTDNELILEDIVQTLTLFEDREMIRKRLDIYKDFFTESQLKKLYRRHYTGWGRLSAKLINGIRNKENQKTILDYLIDDGSANRNFMQLIKDAGLSFKPIIDKARTGSHSDNLKEVVGELAGSPAIKKGILQSLKIVDELVKVMGYEPEQIVVEMARENQTTAKGLSRLRQRLTTLRESLANLKSNILEEKKPKYVKDQVENHHLSDDRLFLYYLQNGKDMYTDDELDIDNLSQYDIDHIIPQAFIKDDSIDNRVLVSSAKNRGKSDDVPSVEIVKDCKVFWKKLLDAKLMSQRKYDNLTKAERGGLTSDDKARFIQRQLVETRQITKHVARILDERFNNELDSKGRRIRKVKIVTLKSNLVSNFRKEFGFYKIREVNNYHHAHDAYLNAVVAKAILTKYPQLEPEFVYGDYPKYNSYKTRKSATEKLFFYSNIMNFFKTKVTLADGTVVVKDDIEVNNDTGEIVWDKKKHFATVRKVLSYPQVNIVKKTEIQTGGFSKESILAHGNSDKLIPRKTKDIYLDPKKYGGFDSPIVAYSVLVVADIKKGKAQKLKTVTELLGITIMERSRFEKNPSAFLESKGYLNIRDDKLMILPKYSLFELENGRRRLLASADELQKGNELALPTQFMKFLYLASRYNELKGKPEEIEQKQEFVVQHVSYFDDILQIINDFSNRVILADANLEKINKLYQDNKENIPVDELANNIINLFTFTSLGAPAAFKFFDKIVDRKRYTSTKEVLNSTLIHQSITGLYETRIDLGKLGED

SEQ ID NO: 646 - protein, 1377 aa, Streptococcus agalactiae
MNKPYSIGLDIGTNSVGWSIITDDYKVPAKKMRVLGNTDKEYIKKNLIGALLFDGGNTAADRRLKRTARRRYTRRRNRILYLQEIFAEEMSKVDDSFFHRLEDSFLVEEDKRGSKYPIFATMQEEKYYHEKFPTIYHLRKELADKKEKADLRLVYLALAHIIKFRGHFLIEDDRFDVRNTDIQKQYQAFLEIFDTTFENNHLLSQNVDVEAILTDKISKSAKKDRILAQYPNQKSTGIFAEFLKLIVGNQADFKKHFNLEDKTPLQFAKDSYDEDLENLLGQIGDEFADLFSVAKKLYDSVLLSGILTVTDLSTKAPLSASMIQRYDEHHEDLKHLKQFVKASLPENYREVFADSSKDGYAGYIEGKTNQEAFYKYLLKLLTKQEGSEYFLEKIKNEDFLRKQRTFDNGSIPHQVHLTELRAIIRRQSEYYPFLKENQDRIEKILTFRIPYYVGPLAREKSDFAWMTRKTDDSIRPWNFEDLVDKEKSAEAFIHRMTNNDLYLPEEKVLPKHSLIYEKFTVYNELTKVRFLAEGFKDFQFLNRKQKETIFNSLFKEKRKVTEKDIISFLNKVDGYEGIAIKGIEKQFNASLSTYHDLKKILGKDFLDNTDNELILEDIVQTLTLFEDREMIKKCLDIYKDFFTESQLKKLYRRHYTGWGRLSAKLINGIRNKENQKTILDYLIDDGSANRNFMQLINDDDLSFKPIIDKARTGSHSDNLKEVVGELAGSPAIKKGILQSLKIVDELVKVMGYEPEQIVVEMARENQTTAKGLSRSRQRLTTLRESLANLKSNILEEKKPKYVKDQVENHHLSDDRLFLYYLQNGRDMYTKKALDIDNLSQYDIDHIIPQAFIKDDSIDNRVLVSSAKNRGKSDDVPSIEIVKARKMFWKNLLDAKLMSQRKYDNLTKAERGGLTSDDKARFIQRQLVETRQITKHVARILDERFNNEVDNGKKICKVKIVTLKSNLVSNFRKEFGFYKIREVNDYHHAHDAYLNAVVAKAILTKYPQLEPEFVYGMYRQKKLSKIVHEDKEEKYSEATRKMFFYSNLMNMFKRVVRLADGSIVVRPVIETGRYMGKTAWDKKKHFATVRKVLSYPQNNIVKKTEIQTGGFSKESILAHGNSDKLIPRKTKDIYLDPKKYGGFDSPIVAYSVLVVADIKKGKAQKLKTVTELLGITIMERSRFEKNPSAFLESKGYLNIRDDKLMILPKYSLFELENGRRRLLASAGELQKGNELALPTQFMKFLYLASRYNESKGKPEEIEKKQEFVNQHVSYFDDILQLINDFSKRVILADANLEKINKLYQDNKENIPVDELANNIINLFTFTSLGAPAAFKFFDKIVDRKRYTSTKEVLNSTLIHQSITGLYETRIDLGKLGED

SEQ ID NO: 647 - protein, 1370 aa, Streptococcus agalactiae
  misc_feature (117)..(117): Xaa can be any naturally occurring amino acid
MNKPYSIGLDIGTNSVGWSIITDDYKVPAKKMRVLGNTDKEYIKKNLIGALLFDGGNTAADRRLKRTARRRYTRRRNRILYLQEIFAEEMSKVDDSFFHRLEDSFLVEEDKRGSKYXIFATLQEEKDYHEKFSTIYHLRKELADKKEKADLRLIYIALAHIIKFRGHFLIEDDSFDVRNTDISKQYQDFLEIFNTTFENNDLLSQNVDVEAILTDKISKSAKKDRILAQYPNQKSTGIFAEFLKLIVGNQADFKKYFNLEDKTPLQFAKDSYDEDLENLLGQIGDEFADLFSAAKKLYDSVLLSGILTVIDLSTKAPLSASMIQRYDEHREDLKQLKQFVKASLPEKYQEIFADSSKDGYAGYIEGKTNQEAFYKYLSKLLTKQEDSENFLEKIKNEDFLRKQRTFDNGSIPHQVHLTELKAIIRRQSEYYPFLKENQDRIEKILTFRIPYYIGPLAREKSDFAWMTRKTDDSIRPWNFEDLVDKEKSAEAFIHRMTNNDFYLPEEKVLPKHSLIYEKFTVYNELTKVRYKNEQGETYFFDSNIKQEIFDGVFKEHRKVSKKKLLDFLAKEYEEFRIVDVIGLDKENKAFNASLGTYHDLEKILDKDFLDNPDNESILEDIVQTLTLFEDREMIKKRLENYKDLFTESQLKKLYRRHYTGWGRLSAKLINGIRDKESQKTILDYLIDDGRSNRNFMQLINDDGLSFKSIISKAQAGSHSDNLKEVVGELAGSPAIKKGILQSLKIVDELVKVMGYEPEQIVVEMARENQTTNQGRRNSRQRYKLLDDGVKNLASDLNGNILKEYPTDNQALQNERLFLYYLQNGRDMYTGEALDIDNLSQYDIDHIIPQAFIKDDSIDNRVLVSSAKNRGKSDDVPSLEIVKDCKVFWKKLLDAKLMSQRKYDNLTKAERGGLTSDDKARFIQRQLVETRQITKHVARILDERFNNELDSKGRRIRKVKIVTLKSNLVSNFRKEFGFYKIREVNNYHHAHDAYLNAVVAKAILTKYPQLEPEFVYGDYPKYNSYKTRKSATEKLFFYSNIMNFFKTKVTLADGTVVVKDDIEVNNDTGEIVWDKKKHFATVRKVLSYPQNNIVKKTEIQTGGFSKESILAHGNSDKLIPRKTKDIYLDPKKYGGFDSPIVAYSVLVVADIKKGKAQKLKTVTELLGITIMERSRFEKNPSAFLESKGYLNIRADKLIILPKYSLFELENGRRRLLASAGELQKGNELALPTQFMKFLYLASRYNESKGKPEEIEKKQEFVNQHVSYFDDILQLINDFSKRVILADANLEKINKLYQDNKENISVDELANNIINLFTFTSLGAPAAFKFFDKIVDRKRYTSTKEVLNSTLIHQSITGLYETRIDLGKLGED

SEQ ID NO: 648 - protein, 1370 aa, Streptococcus agalactiae
MNKPYSIGLDIGTNSVGYSVVTDDYKVPAKKMRVLGNTDKEYIKKNLIGALLFDGGNTASDRRLKRTARRRYTRRRNRILYLQEIFAEEMSKVDDSFFHRLEDSFLVEDDKRGSKYPIFATMQEEKDYHEKFPTIYHLRKELADKKEKADLRLVYLALAHIIKFRGHFLIEDDSFDVRNTDIQRQYQAFLEIFDTTFENNHLLSQNIDVEGILTDKISKSAKKDRILAQYPNQKSTGIFAEFLKLIVGNQADFKKHFNLEDKTPLQFAKDSYDEDLENLLGQIGDEFADLFSVAKKLYDSVLLSGILTVTDLSTKAPLSASMIQRYDEHREDLKQLKQFVKASLPEKYQEIFTDSSKDGYAGYIEGKTNQGAFYKYLSKLLTKQEGSEYFLEKIKNEDFLRKQRTFDNGSIPHQVHLTELKAIIRRQSEYYPFLKENLDRIEKILTFRIPYYVGPLAREKSDFAWMTRKTDDSIRPWNFEELVDKEASAEAFIHRMTNNDLYLPEEKVLPKHSLIYEKFTVYNELTKVRYKNEQGETYFFDSNIKQEIFDGVFKEHRKVSKKKLLDFLAKEYEEFRIVDVIGLDKENKAFNASLGTYHDLKKILDKDFLDNPDNESILEDIVQTLTLFEDREMIKKRLENYKDLFTESQLKKLYRRHYTGWGRLSAKLINGIRDKESQKTILDYLISDGRANRNFMQLIHDDGLSFKPIIDKAQAGSHSDNLKEVVGELAGSPAIKKGILQSLKIVDELVKVMGYEPEQVVVEMARENQTTNQGRRNTRQRYKLLEEGVKNLASDLNGNILKEYPTDNQALQNERLFLYYLQNGRDMYTGEALDIDNLSQYDIDHIVPQAFIKDDSIDNRVLVSSAKNRGKSDNVPSIDIVKARKAFWKKLLDAKLMSQRKYDNLTKAERGGLTSDDKARFIQRQLVETRQITKHVARILDERFNNELDSKGRRIRKVKIVTLKSNLVSNFRKEFGFYKIREVNDYHHAHDAYLNAVVAKAILTKYPQLEPEFVYGDYPKYNSYKTRKSATEKLFFYSNIMNFFKTKVTLADGTVVVKDDIEVNNDTGEIVWDKKKHFATVRKVLSYPQVNIVKKTEIQTGGFSKESILAHGNSDKLIPRKTKDIYLDPKKYGGFDSPIVAYSVLVVADIKKGKAQKLKTVTELLGITIMERFRFEKNPSAFLESKGYLNIRDDKLMILPKYSLFELENGRRRLLASAGELQKGNELALPTQYMKFLYLASRYNELKGKPEEIEQKQEFVVQHVSYFDDILQIINDFSNRVILADANLEKINKLYQDNKENISVDELANNIINLFTFTSLGAPAAFKFFDKIVDRKRYTSTKEVLNSTLIHQSITGLYETRIDLGKLGED

SEQ ID NO: 649 - protein, 1370 aa, Streptococcus agalactiae
MNKPYSIGLDIGTNSVGYSVVTDDYKVPAKKMRVLGNTDKEYIKKNLIGALLFDGGNTASDRRLKRTARRRYTRRRNRILYLQEIFAEEMSKVDDSFFHRLEDSFLVEDDKRGSKYPIFATMQEEKDYHEKFPTIYHLRKELADKKEKANLRLVYLALAHIIKFRGHFLIEDDSFDVRNTDIQRQYQAFLEIFDTTFENNHLLSQNIDVEGILTDKISKSAKKDRILAQYPNQKSTGIFAEFLKLIVGNQADFKKHFNLEDKTPLQFAKDSYDEDLENLLGQIGDEFADLFSVAKKLYDSVLLSGILTVTDLSTKAPLSASMIQRYDEHREDLKQLKQFVKASLPEKYQEIFTDSSKDGYAGYIEGKTNQGAFYKYLSKLLTKQEGSEYFLEKIKNEDFLRKQRTFDNGSIPHQVHLTELKAIIRRQSEYYPFLKENLDRIEKILTFRIPYYVGPLAREKSDFAWMTRKTDDSIRPWNFEELVDKEASAEAFIHRMTNNDLYLPEEKVLPKHSLIYEKFTVYNELTKVRYKNEQGETYFFDSNIKQEIFDGVFKEHRKVSKKKLLDFLAKEYEEFRIVDVIGLDKENKAFNASLGTYHDLKKILDKDFLDNPDNESILEDIVQTLTLFEDREMIKKRLENYKDLFTESQLKKLYRRHYTGWGRLSAKLINGIRDKESQKTILDYLISDGRANRNFMQLIHDDGLSFKPIIDKAQAGSHSDNLKEVVGELAGSPAIKKGILQSLKIVDELVKVMGYEPEQVVVEMARENQTTNQGRRNTRQRYKLLEEGVKNLASDLNGNILKEYPTDNQALQNERLFLYYLQNGRDMYTGEALDIDNLSQYDIDHIVPQAFIKDDSIDNRVLVSSAKNRGKSDNVPSIDIVKARKAFWKKLLDAKLMSQRKYDNLTKAERGGLTSDDKARFIQRQLVETRQITKHVARILDERFNNELDSKGRRIRKVKIVTLKSNLVSNFRKEFGFYKIREVNDYHHAHDAYLNAVVAKAILTKYPQLEPEFVYGDYPKYNSYKTRKSATEKLFFYSNIMNFFKTKVTLADGTVVVKDDIEVNNDTGEIVWDKKKHFATVRKVLSYPQVNIVKKTEIQTGGFSKESILAHGNSDKLIPRKTKDIYLDPKKYGGFDSPIVAYSVLVVADIKKGKAQKLKTVTELLGITIMERFRFEKNPSAFLESKGYLNIRDDKLMILPKYSLFELENGRRRLLASAGELQKGNELALPTQYMKFLYLASRYNELKGKPEEIEQKQEFVVQHVSYFDDILQIINDFSNRVILADANLEKINKLYQDNKENISVDELANNIINLFTFTSLGAPAAFKFFDKIVDRKRYTSTKEVLNSTLIHQSITGLYETRIDLGKLGED

SEQ ID NO: 650 - protein, 1370 aa, Streptococcus agalactiae
  misc_feature (9)..(9): Xaa can be any naturally occurring amino acid
MNKPYSIGXDIGTNSVGWSIITDDYKVPAKKMRVLGNTDKEYIKKNLIGALLFDGGNTAADRRLKRTARRRYTRRRNRILYLQEIFAEEMSKVDDSFFHRLEDSFLVEEDKRGSKYPIFATLQEEKDYHEKFSTIYHLRKELADKKEKADLRLIYIALAHIIKFRGHFLIEDDSFDVRNTDISKQYQDFLEIFNTTFENNDLLSQNVDVEAILTDKISKSAKKDRILAQYPNQKSTGIFAEFLKLIVGNQADFKKYFNLEDKTPLQFAKDSYDEDLENLLGQIGDEFADLFSAAKKLYDSVLLSGILTVIDLSTKAPLSASMIQRYDEHREDLKQLKQFVKASLPEKYQEIFADSSKDGYAGYIEGKTNQEAFYKYLSKLLTKQEDSENFLEKIKNEDFLRKQRTFDNGSIPHQVHLTELKAIIRRQSEYYPFLKENQDRIEKILTFRIPYYIGPLAREKSDFAWMTRKTDDSIRPWNFEDLVDKEKSAEAFIHRMTNNDFYLPEEKVLPKHSLIYEKFTVYNELTKVRYKNEQGETYFFDSNIKQEIFDGVFKEHRKVSKKKLLDFLAKEYEEFRIVDVIGLDKENKAFNASLGTYHDLEKILDKDFLDNPDNESILEDIVQTLTLFEDREMIKKRLENYKDLFTESQLKKLYRRHYTGWGRLSAKLINGIRDKESQKTILDYLIDDGRSNRNFMQLINDDGLSFKSIISKAQAGSHSDNLKEVVGELAGSPAIKKGILQSLKIVDELVKVMGYEPEQIVVEMARENQTTNQGRRNSRQRYKLLDDGVKNLASDLNGNILKEYPTDNQALQNERLFLYYLQNGRDMYTGEALDIDNLSQYDIDHIIPQAFIKDDSIDNRVLVSSAKNRGKSDDVPSLEIVKDCKVFWKKLLDAKLMSQRKYDNLTKAERGGLTSDDKARFIQRQLVETRQITKHVARILDERFNNELDSKGRRIRKVKIVTLKSNLVSNFRKEFGFYKIREVNNYHHAHDAYLNAVVAKAILTKYPQLEPEFVYGDYPKYNSYKTRKSATEKLFFYSNIMNFFKTKVTLADGTVVVKDDIEVNNDTGEIVWDKKKHFATVRKVLSYPQNNIVKKTEIQTGGFSKESILAHGNSDKLIPRKTKDIYLDPKKYGGFDSPIVAYSVLVVADIKKGKAQKLKTVTELLGITIMERSRFEKNPSAFLESKGYLNIRADKLIILPKYSLFELENGRRRLLASAGELQKGNELALPTQFMKFLYLASRYNESKGKPEEIEKKQEFVNQHVSYFDDILQLINDFSKRVILADANLEKINKLYQDNKENISVDELANNIINLFTFTSLGAPAAFKFFDKIVDRKRYTSTKEVLNSTLIHQSITGLYETRIDLGKLGED

SEQ ID NO: 651 - protein, 1125 aa, Streptococcus anginosus
MNGLVLGLDIGIASVGVGILNKETGEIIHANSRIFPAATADSNVERRGFRQGRRLGRRKKHRSARLNNLFEEFGFITDFSAIPLNLNPYALRVKGLSEELTNEELFIALKNIIKRRGISYLDDASEDGETASNEYGKAVEENRKLLADKTPGQIQLERFEKYGQVRGDFTVVENGENHRLINVFSTSAYKKEAERILRRQQEFNVRISDEFIEAYLTILTGKRKYYHGPGNEKSRTDYGRFRTDGTTLDNIFGILIGKCTFYPDEYRAAKASYTAQEFNLLNDLNNLTVPTETKKLSPEQKRQIVEYARTAKTLGTPTLLKYIAKLVDGSIDDIKGYRIDKSDKPEMHTFDAYRKMRTLDLVNIDALSRETLDDLAHILTLNTESEGILEALNSKMPSTFTKEQIDELIQFRKKNSAVFGKGWHNFSLKLMNELISELYETSEEQMTILTRLGKQRSREISKRTKYIDEKELTEEIYNPVVAKSVRQAIKIINEATKRYGIFDNIVIEMARENNEEDAKKDYIKRQKANQDEKNASMEKAAFQYNGKKELPDSIFHGHKELATKIRLWHQQGERCLYTGKNISIRDLIHNPHQYEIDHILPLSLSFDDGLANKVLVLATANQEKGQRTPFQAIDSMDDAWSYREFKQYVRNSKSLSNKKKDYLLTEEDISKIEVKQKFIERNLVDTRYSSRVVLNTLQEFYKTNDFDTKISVVRGQFTSQLRRKWKIEKSRDTYHHHAVDALIIAASSQLRLWKKQNNPLISYKEGQFVDPETGEILSLTDDEYKELVFRPPYDYFVDTLKSKSFEDSILFSYQVDSKYNRKISDATIYGTRKAQLGKDKQEETYVLGKIKDIYSQKGYEDFIKRYNKDETQFLIYHKDPQTFEKVIEEILKTYPDKELNEKGKEIPCNPFEKYRQENGPIRKYSKKGKGPEIKSLKYYDNKLGNHIDITPVNSQNQVVLQSLKPWRTDVYFNPRTSKYELMGLKYSDLRFEKGSGSYGISPEKYNKVKAKEGVNEDSEFKFTLYKNDLILIKDTETGEQQLFRYGSRNDTSKHYVELKPYEKAKFEGNQQLMNLLGTVAKGGQCLKGINKPNLSIYKVKTDVLGNKYFIKKEGDQPQLNFKKKF

SEQ ID NO: 652 - protein, 1386 aa, Streptococcus anginosus
MNQKYSIGLDIGTNSVGWAVITDDYKVPAKKMKVLGNTDKQSIKKNLLGALLFDSGETAEATRLKRTARRRYTRRRNRLRYLQEIFAEEMMQVDESFFQRLDDSFLVDEDKRGERHPIFGNIAAEVKYHDEFPTIYHLRKHLADISQKADLRLVYLALAHMIKFRGHFLIEGQLKAENTNVQALFKDFVEVYDKTVEESHLSEITVDALSILTEKVSKSRRLENLIAHYPAEKKNTLFGNLIALFLGLQPNFKTNFQLSEDAKLQFSKDTYEEDLEGLLGEVGDEYADLFASAKNLYDAILLSGILTVDDNSTKAPLSASMVKRYEEHQKDLKKFEDFIKVNALDQYNAIFKDKNKKGYAGYIESGVKQDEFYKYLKGILLQINGSGDFLDKIDREDFLRKQRTFDNGSIPHQIHLQEMHAILRRQGEHYPFLKENQDKIEKILTFRIPYYVGPLARKGSRFAWAEYKADEKITPWNFDDILDKEKSAEKFITRMTLNDLYLPEEKVLPKHSLLYETFTVYNELTKVKYVNEQGEAKFFDANMKQEIFDHVFKENRKVTKDKLLNYLNKEFEEFRIVNLTGLDKENKVFNSSLGTYHDLRKILNKSFLDNKENAQIIEDIIQTLTLFEDREMIRQRLQKYSDIFTKAQLKKLERRHYTGWGRLSYKLINGIRNKENKKTILDYLIDDGYANRNFMQLINDDALSFKEEIAKAQIIGDVDDIANVVHDLPGSPAIKKGILQSVKIVDELVKVMGHNPANIIIEMARENQTTDRGRRNSQQRLKLLQDSLKNLDNPVNIKNVENQQLQNDRLFLYYIQNGKDMYTGETLDINNLSQYDIDHIIPQAYIKDDSFDNRVLTSSSENRGKSDNVPSIEVVCARKADWMRLRKAGLISQRKFDNLTKAERGGLTENDKAGFIKRQLVETRQITKHVAQVLDARFNAKHDENKKVIRDVKIITLKSNLVSQFRKDFKFYKVREINDYHHAHDAYLNAVIGTALLKKYPKLASEFVYGEFKKYDVRKFIAKSDKEIGKATAKYFFYSNLMNFFKKEVKFADGTVVERPDIETSEDGEIAWNKQTDFKIVRKVLSYPQVNIVKKTEVQTHGLDRGKPRGLFNANPSPKPKPDSSENLVGVKRNLDPKKYGGYAGISNSYAVLVKAIIEKGVKKKETMVLEFQGISILDRITFEKDKRAFLLGKGYKDIKKIIELPKYSLFELKDGSRRMLASILSTNNKRGEIHKGNELFVPQKFTTLLYHAKRINNPINKDHIEYVKKHRDDFKELLNYVLEFNEKYVGATKNGERLKEAVADFDSKSNEEICTSFLGAVNSKNAGLFELTSLGSASDFEFLGVKIPRYRDYTPSSLLKDSTLIHQSITGLYETRIDLSKLGED

SEQ ID NO: 653 - protein, 1396 aa, Streptococcus anginosus
MTKPYSIGLDIGTNSVGWAVITDDYKVPAKKMKVLGNTNRDYIKKNLLGALLFDGGETAEGRRLKRTARRRYTRRKNRLRYLQEIFAEEMMQVDESFFQRLDDSFLVEEDKQGSKYPIFGTLKEEKEYHKKFKTIYHLREELANSKEKADLRLVYLALAHMIKFRGHFLYEGDLKAENTDVQALFKDFVEEYDKTIEESHLSEITVDALSILTEKVSKSSRLENLIAHYPTEKKNTLFGNLIALSLGLQANFKTNFQLSEDAKLQFSKDTYEEDLEGLLGEVGDEYADLFVSAKNLYDAILLSGILTVDDNSTKAPLSASMVKRYKEHKEELAAFKRFIKEKLPKKYEEIFKDDTKNGYAGYVGADKKLRKRSGKLATEEEFYKYVKGILNKVEGADYFLDKIDREDFLRKQRTFDNGSIPHQIHLQEMHAILRRQGEHYPFLKENQDKIEKILTFRIPYYVGPLARKGSRFAWAEYKADEKITPWNFDDILDKEKSAEKFITRMTLNDLYLPEEKVLPKHSPLYETFTVYNELTKVKYVNEQGEAKFFDTNMKQEIFDHVFKENRKVTKDKLLNYLNKEFEEFRIVNLTGLDKENKAFNASLGTYHDLRKILDKSFLDDKVNEKIIEDIIQTLTLFEDREMIRQRLQKYSDIFTTQQLKELERRHYTGWGRLSYKLINGIRNKENKKTILDYLIDDGYANRNFMQLINDDALSFKEEIARAQIIGDVDDIANVVHDLPGSPAIKKGILQSVKIVDELVKVMGHNPTNIIIEMARENQTTDKGRRNSQQRLKLLQDSLKNLDNPVNIKNVENQQLQNDRLFLYYIQNGKDMYTGETLDINNLSQYDIDHIIPQAFIKDNSLDNRVLTRSDKNRGKSDDVPSIEVVHEMKSFWSKLLSVKLITQRKFDNLTKAERGGLTENDKAGFIKRQLVETRQITKHVAQVLDARFNAKHDENKKVIRDVKIITLKSNLVSQFRKDFKFYKVREINDYHHAHDAYLNAVIGTALLKKYPKLASEFVYGEFKKYDVRKFIAKSDKEIGKATAKYFFYSNLMNFFKKEVKFADGTVVERPDIETSEDGEIAWNKQTDFKIVRKVLSYPQVNIVKKTEVQTHGLDRGKPRGLFNANPSPKPKPDSSENLVGIKRNLDPKKYGGYAGISNSYAVLVKAIIEKGVKKKETMVLEFQGISILDRITFEKDKRAFLLGKGYKDIKKIIELPKYSLFELKDGSRRMLASILSTNNKRGEIHKGNELFVPQKFTTLLYHAKRINNPINKDHIEYVKKHRDDFKELLNYVLEFNEKYVGATKNGERLKEAVADFDSKSNEEICTSFLGAVNSKNAGLFELTSLGSASDFEFLGVKIPRYRDYTPSSLLKDSILIHQSITGLYETRIDLSKLGED

SEQ ID NO: 654 - protein, 1375 aa, Streptococcus canis
MEKKYSIGLDIGTNSVGWAVITDDYKVPSKKFKVLGNTNRKSIKKNLMGALLFDSGETAEATRLKRTARRRYTRRKNRIRYLQEIFANEMAKLDDSFFQRLEESFLVEEDKKNERHPIFGNLADEVAYHRNYPTIYHLRKKLADSPEKADLRLIYLALAHIIKFRGHFLIEGKLNAENSDVAKLFYQLIQTYNQLFEESPLDEIEVDAKGILSARLSKSKRLEKLIAVFPNEKKNGLFGNIIALALGLTPNFKSNFDLTEDAKLQLSKDTYDDDLDELLGQIGDQYADLFSAAKNLSDAILLSDILRSNSEVTKAPLSASMVKRYDEHHQDLALLKTLVRQQFPEKYAEIFKDDTKNGYAGYVGIGIKHRKRTTKLATQEEFYKFIKPILEKMDGAEELLAKLNRDDLLRKQRTFDNGSIPHQIHLKELHAILRRQEEFYPFLKENREKIEKILTFRIPYYVGPLARGNSRFAWLTRKSEEAITPWNFEEVVDKGASAQSFIERMTNFDEQLPNKKVLPKHSLLYEYFTVYNELTKVKYVTERMRKPEFLSGEQKKAIVDLLFKTNRKVTVKQLKEDYFKKIECFDSVEIIGVEDRFNASLGTYHDLLKIIKDKDFLDNEENEDILEDIVLTLTLFEDREMIEERLKTYAHLFDDKVMKQLKRRHYTGWGRLSRKMINGIRDKQSGKTILDFLKSDGFSNRNFMQLIHDDSLTFKEEIEKAQVSGQGDSLHEQIADLAGSPAIKKGILQTVKIVDELVKVMGHKPENIVIEMARENQTTTKGLQQSRERKKRIEEGIKELESQILKENPVENTQLQNEKLYLYYLQNGRDMYVDQELDINRLSDYDVDHIVPQSFIKDDSIDNKVLTRSVENRGKSDNVPSEEVVKKMKNYWRQLLNAKLITQRKFDNLTKAERGGLSEADKAGFIKRQLVETRQITKHVARILDSRMNTKRDKNDKPIREVKVITLKSKLVSDFRKDFQLYKVRDINNYHHAHDAYLNAVVGTALIKKYPKLESEFVYGDYKVYDVRKMIAKSEQEIGKATAKRFFYSNIMNFFKTEVKLANGEIRKRPLIETNGETGEVVWNKEKDFATVRKVLAMPQVNIVKKTEVQTGGFSKESILSKRESAKLIPRKKGWDTRKYGGFGSPTVAYSILVVAKVEKGKAKKLKSVKVLVGITIMEKGSYEKDPIGFLEAKGYKDIKKELIFKLPKYSLFELENGRRRMLASATELQKANELVLPQHLVRLLYYTQNISATTGSNNLGYIEQHREEFKEIFEKIIDFSEKYILKNKVNSNLKSSFDEQFAVSDSILLSNSFVSLLKYTSFGASGGFTFLDLDVKQGRLRYQTVTEVLDATLIYQSITGLYETRTDLSQLGGD

SEQ ID NO: 655 - protein, 1345 aa, Streptococcus constellatus
MGKPYSIGLDIGTNSVGWAVVTDDYKVPAKKMKVLGNTDKQSIKKNLLGALLFDSGETAEATRLKRTARRRYTRRKNRLRYLQEIFTGEMNKVDENFFQRLDDSFLVDEDKRGEHHPIFGNIAAEVKYHDDFPTIYHLRRHLADTSKKADLRLVYLALAHMIKFRGHFLYEGDLKAENTDVQALFKDFVEEYDKTIEESHLSEITVDALSILTEKVSKSSRLENLIAHYPTEKKNTLFGNLIALSLDLHPNFKTNFQLSEDAKLQFSKDTYEEDLEGFLGEVGDEYADLFASAKNLYDAILLSGILTVDDNSTKAPLSASMVKRYEEHQKDLKKLKDFIKVNAPDQYNAIFKDKNKKGYASYIESGVKQDEFYKYLKGILLKINGSGDFLDKIDREDFLRKQRTFDNGSIPHQIHLQEMHAILRRQGEHYPFLKENQDKIEKILTFRIPYYVGPLARKGSRFAWAEYKADEKITPWNFDDILDKEKSAEKFITRMTLNDLYLPEEKVLPKHSPLYEAFTVYNELTKVKYVNEQGEAKFFDTNMKQEIFDHVFKENRKVTKDKLLNYLNKEFEEFRIVNLTGLDKENKAFNSSLGTYHDLRKILDKSFLDDKANEKTIEDIIQTLTLFEDREMIRQRLQKYSDIFTKAQLKKLERRHYTGWGRLSYKLINGIRNKENKKTILDYLIDDGYANRNFMQLINDDALSFKEEIARAQIIDDVDDIANVVHDLPGSPAIKKGILQSVKIVDELVKVMGHNPANIIIEMARENQTTDKGRRNSQQRLKLLQDSLKNLDNPVNIKNVENQQLQNDRLFLYYIQNGKDMYTGETLDINNLSQYDIDHIIPQAFIKDNSLDNRVLTRSDKNRGKSDDVPSIEVVHEMKSFWSKLLSVKLITQRKFDNLTKAERGGLTEEDKAGFIKRQLVETRQITKHVAQILDERFNTEFDGNKRRIRNVKIITLKSNLVSNFRKEFELYKVREINDYHHAHDAYLNAVVGNALLLKYPQLEPEFVYGEYPKYNSYRSRKSATEKFLFYSNILRFFKKEDIQTNEDGEIAWNKEKHIKILRKVLSYPQVNIVKKTEEQTGGFSKESILPKGESDKLIPRKTKNSYWDPKKYGGFDSPVVAYSILVFADVEKGKSKKLRKVQDMVGITIMEKKRFEKNPVDFLEQRGYRNVRLEKIIKLPKYSLFELENKRRRLLASAKELQKGNELVIPQRFTTLLYHSYRIEKDYEPEHREYVEKHKDEFKELLEYISVFSRKYVLADNNLTKIEMLFSKNKDAEVSSLAKSFISLLTFTAFGAPAAFNFFGENIDRKRYTSVTECLNATLIHQSITGLYETRIDLSKLGED

SEQ ID NO: 656 - protein, 538 aa, Streptococcus dysgalactiae
DYDVDHIVPQSFIKDDSIDNKVLTRSDKNRGKSDNVPSEEVVKKMKNYWRQLLNAKLITQRKFDNLTKAERGGLSELDKAGFIKRQLVETRQITKHVAQILDSRMNTKYDENDKLIREVKVITLKSKLVSDFRKDFQFYKVREINNYHHAHDAYLNAVVGTALIKKYPKLESEFVYGDYKVYDVRKMIAKSEQEIGKATAKRFFYSNIMNFFKTEITLANGEIRKRPLIETNEETGEIVWDKGRDFATVRKVLSMPQVNIVKKTEVQTGALTNESIYARGSFDKLISRKHRFESSKYGGFGSPTVTYSVLVVAKSKVQDGKVKKIKTGKELIGITLLDKLVFEKNPLKFIEDKGYGNVQIDKCIRLPKYSLFEFENGTRRMLASVMANNNSRGDLQKANEMFLPAKLVTLLYHAHKIESSKELEHEAYILDHYNDLYQLLSYIERFASLYVDVEKNISKVKELFSNIESYSISEICSSVINLLTLTASGAPADFKFLGTTIPRKRYGSPQSILSSTLIHQSITGLYETRIDLSQLGGD

SEQ ID NO: 657 - protein, 1155 aa, Streptococcus dysgalactiae
MDKKYSIGLDIGTNSVGWAVITDDYKVPSKKFKVLGNTDRHSIKKNLIGALLFDSGETAEATRLKRSARRRYTRRKNRIRYLQEIFSSEMSKVDDSFFHRLEESFLVEEDKKHERHPIFGNIVDEVAYHEKYPTIYHLRKKLADSTDKADLRLIYLALAHMIKFRGHFLIEGDLNPDNSDMDKLFIQLVQTYNQLFEENPINASRVDAKAILSARLSKSRRLENLIAQLPGEKRNGLFGNLIALSLGLTPNFKSNFDLAEDAKLQLSKDTYDDDLDNLLAQIGDQYADLFLAAKNLSDAILLSDILRVNSEITKAPLSASMIKRYDEHHQDLTLLKALVRQQLPEKYKEIFFDQSKNGYAGYIDGGASQEEFYKFIKPILEKMDGTEELLAKLNREDLLRKQRTFDNGSIPHQIHLGELHAILRRQEDFYPFLKDNREKIEKILTFRIPYYVGPLARGNSRFAWMTRKSEETITPWNFEEVVDKGASAQSFIERMTNFDKNLPNEKVLPKHSLLYEYFTVYNELTKVKYVTEGMRKPEFLSGKQKEAIVDLLFKTNRKVTVKQLKEDYFKKIECFDSVEISGVEDRFNASLGTYHDLLKIIKDKDFLDNEENEDILEDIVLTLTLFEDKEMIEERLKTYAHLFDDKVMKQLKRRHYTGWGRLSRKLINGIRDKQSGKTILDFLKSDGFANRNFIQLIHDDSLTFKEAIQKAQVSGQGHSLHEQIANLAGSPAIKKGILQSVKVVDELVKVMGHKPENIVIEMARENQTTQKGQKNSRERMKRIEEGIKELGSQILKEHPVENTQLQNEKLYLYYLQNRRDMYVDQELDINRLSDYDVDHIVPQSFIKDDSIDNKVLTRSDKNRGKSDDVPSEEVVKKMKNYWRQLLNAKLITQRKFDNLTKAERGGLSELDKAGFIKRQLVETRQITKHVAQILDSRMNTKYDENDKLIREVKVITLKSKLVSDFRKDFQFYKVREINNYHHAHDAYLNAVVGTALIKKYPKLESEFVYGDYKVYDVRKMIAKSEQEIGKATAKRFFYSNIMNFFKTEITLANGEIRKRPLIETNEETGEIVWDKGRDFATVRKVLSMPQVNIVKKTEVQTGALTNESIYARGSFDKLISRKHRFESSKYGGFGSPTVTYSVLVVAKYQSYKMEK

SEQ ID NO: 658 - protein, 1371 aa, Streptococcus dysgalactiae
MDKKYSIGLDIGTNSVGWAVITDDYKVPSKKFKVLGNTDRHSIKKNLIGALLFDSGETAEATRLKRTARRRYTRRKNRIRYLQEIFSSEMSKVDDSFFHRLEESFLVEEDKKHERHPIFGNIVDEVAYHEKYPTIYHLRKKLADSTDKADLRLIYLALAHMIKFRGHFLIEGDLNPDNSDMDKLFIQLVQTYNQLFEENPINASRVDAKAILSARLSKSRRLENLIAQLPGEKRNGLFGNLIALSLGLTPNFKSNFDLAEDAKLQLSKDTYDDDLDNLLAQIGDQYADLFLAAKNLSDAILLSDILRVNSEITKAPLSASMIKRYDEHHQDLTLLKALVRQQLPEKYKEIFFDQSKNGYAGYIDGGASQEEFYKFIKPILEKMDGTEELLAKLNREDLLRKQRTFDNGSIPHQIHLGELHAILRRQEDFYPFLKDNREKIEKILTFRIPYYVGPLARGNSRFAWMTRKSEETITPWNFEEVVDKGASAQSFIERMTNFDKNLPNEKVLPKHSLLYEYFTVYNELTKVKYVTEGMRKPEFLSGKQKEAIVDLLFKTNRKVTVKQLKEDYFKKIECFDSVEISGVEDRFNASLGTYHDLLKIIKDKDFLDNEENEDILEDIVLTLTLFEDKEMIEERLKTYAHLFDDKVMKQLKRRHYTGWGRLSRKLINGIRDKQSGKTILDFLKSDGFANRNFIQLIHDDSLTFKEAIQKAQVSGQGHSLHEQIANLAGSPAIKKGILQSVKVVDELVKVMGHKPENIVIEMARENQTTQKGQKNSRERMKRIEEGIKELGSQILKEHPVENTQLQNEKLYLYYLQNGRDMYVDQELDINRLSDYDVDHIVPQSFIKDDSIDNKVLTRSDKNRGKSDDVPSEEVVKKMKNYWRQLLNAKLITQRKFDNLTKAERGGLSELDKAGFIKRQLVETRQITKHVAQILDSRMNTKYDENDKLIREVKVITLKSKLVSDFRKDFQFYKVREINNYHHAHDAYLNAVVGTALIKKYPKLESEFVYGDYKVYDVRKMIAKSEQEIGKATAKRFFYSNIMNFFKTEITLANGEIRKRPLIETNEETGEIVWNKGRDFATVRKVLSMPQVNIVKKTEVQTGALTNESIYARGSFDKLISRKHRFESSKYGGFGSPTVTYSVLVVAKSKVQDGKVKKIKTGKELIGITLLDKLVFEKNPLKFIEDKGYGNVQIDKCIKLPKYSLFEFENGTRRMLASVMANNNSRGDLQKANEMFLPAKLVTLLYHAHKIESSKELEHEAYILDHYNDLYQLLSYIERFASLYVDVEKNISKVKELFSNIESYSISEICSSVINLLTLTASGAPADFKFLGTTIPRKRYGSPQSILSSTLIHQSITGLYETRIDLSQLGGD

SEQ ID NO: 659 - protein, 1371 aa, Streptococcus dysgalactiae
MDKKYSIGLDIGTNSVGWAVITDDYKVPSKKFKVLGNTDRHSIKKNLIGALLFDSGETAEATRLKRTARRRYTRRKNRIRYLQEIFSSEMSKVDDSFFHRLEESFLVEEDKKHERHPIFGNIVDEVAYHEKYPTIYHLRKKLADSTDKADLRLIYLALAHMIKFRGHFLIEGDLNPDNSDMDKLFIQLVQTYNQLFEENPINASRVDAKAILSARLSKSRRLENLIAQLPGEKRNGLFGNLIALSLGLTPNFKSNFDLAEDAKLQLSKDTYDDDLDNLLAQIGDQYADLFLAAKNLSDAILLSDILRVNSEITKAPLSASMIKRYDEHHQDLTLLKALVRQQLPEKYKEIFFDQSKNGYAGYIDGGASQEEFYKFIKPILEKMDGTEELLAKLNREDLLRKQRTFDNGSIPHQIHLGELHAILRRQEDFYPFLKDNREKIEKILTFRIPYYVGPLARGNSRFAWMTRKSEETITPWNFEEVVDKGASAQSFIERMTNFDKNLPNEKVLPKHSLLYEYFTVYNELTKVKYVTEGMRKPEFLSGKQKEAIVDLLFKTNRKVTVKQLKEDYFKKIECFDSVEISGVEDRFNASLGTYHDLLKIIKDKDFLDNEENEDILEDIVLTLTLFEDKEMIEERLKKYANLFDDKVMKQLKRRHYTGWGRLSRKLINGIRDKQSGKTILDFLKSDGFANRNFMQLINDDSLTFKEAIQKAQVSGQGHSLHEQIANLAGSPAIKKGILQSVKVVDELVKVMGHKPENIVIEMARENQTTQKGQKNSRERMKRIEEGIKELGSQILKEHPVENTQLQNEKLYLYYLQNGRDMYVDQELDINRLSDYDVDHIVPQSFIKDDSIDNKVLTRSDKNRGKSDNVPSEEVVKKMKNYWRQLLNAKLITQRKFDNLTKAERGGLSELDKAGFIKRQLVETRQITKHVAQILDSRMNTKYDENDKLIREVKVITLKSKLVSDFRKDFQFYKVREINNYHHAHDAYLNAVVGTALIKKYPKLESEFVYGDYKVYDVRKMIAKSEQEIGKATAKRFFYSNIMNFFKTEITLANGEIRKRPLIETNEETGEIVWDKGRDFATVRKVLSMPQVNIVKKTEVQTGALTNESIYARGSFDKLISRKHRFESSKYGGFGSPTVTYSVLVVAKSKVQDGKVKKIKTGKELIGITLLDKLVFEKNPLKFIEDKGYGNVQIDKCIKLPKYSLFEFENGTRRMLASVMANNNSRGDLQKANEMFLPAKLVTLLYHAHKIESSKELEHEAYILDHYNDLYQLLSYIERFASLYVDVEKNISKVKELFSNIESYSISEICSSVINLLTLTASGAPADFKFLGTTIPRKRYGSPQSILSSTLIHQSITGLYETRIDLSQLGGD

SEQ ID NO: 660 - protein, 1371 aa, Streptococcus dysgalactiae
MDKKYSIGLDIGTNSVGWAVITDDYKVPSKKFKVLGNTDRHSIKKNLIGALLFDSGETAEATRLKRTARRRYTRRKNRIRYLQEIFSSEMSKVDDSFFHRLEESFLVEEDKKHERHPIFGNIVDEVAYHEKYPTIYHLRKKLADSTDKADLRLIYLALAHMIKFRGHFLIEGDLNPDNSDVDKLFIQLVQTYNQLFEEKPINASGVDAKAILSARLSKSKRLENLIAQLPGEKKNGLFGNLIALSLGLTPNFKSNFDLAEDAKLQLSKDTYDDDLDNLLAQIGNQYADLFLAAKNLSDAILLSDILRVNSEITKAPLSASMIKRYDEHHQDLTLLKALVRQQLPEKYKEIFFDQSKNGYAGYIDGGASQEEFYKFIKPILEKMDGTEELLAKLNREDLLRKQRTFDNGSIPHQIHLGELHAILRRQEDFYPFLKDNREKIEKILTFRIPYYVGPLARGNSRFAWMTRKSEETITPWNFEEVVDKGASAQSFIERMTNFDKNLPNEKVLPKHSLLYEYFTVYNELTKVKYVTEGMRKPEFLSGKQKEAIVDLLFKTNRKVTVKQLKEDYFKKIECFDSVEISGVEDRFNASLGTYHDLLKIIKDKDFLDNEENEDILEDIVLTLTLFEDKEMIEERLKKYANLFDDKVMKQLKRRHYTGWGRLSRKLINGIRDKQSGKTILDFLKSDGFANRNFMQLINDDSLTFKEAIQKAQVSGQGHSLHEQIANLAGSPAIKKGILQSVKVVDELVKVMGHKPENIVIEMARENQTTQKGQKNSRERMKRIEEGIKELGSQILKEHPVENTQLQNEKLYLYYLQNGRDMYVDQELDINRLSDYDVDHIVPQSFIKDDSIDNKVLTRSDKNRGKSDNVPSEEVVKKMKNYWRQLLNAKLITQRKFDNLTKAERGGLSELDKAGFIKRQLVETRQITKHVAQILDSRMNTKYDENDKLIREVKVITLKSKLVSDFRKDFQFYKVREINNYHHAHDAYLNAVVGTALIKKYPKLESEFVYGDYKVYDVRKMIAKSEQEIGKATAKRFFYSNIMNFFKTEITLANGEIRKRPLIETNEETGEIVWDKGRDFATVRKVLSMPQVNIVKKTEVQTGALTNESIYARGSFDKLISRKHRFESSKYGGFGSPTVTYSVLVVAKSKVQDGKVKKIKTGKELIGITLLDKLVFEKNPLKFIEDKGYGNVQIDKCIKLPKYSLFEFENGTRRMLASVMANNNSRGDLQKANEMFLPAKLVTLLYHAHKIESSKELEHEAYILDHYNDLYQLLSYIERFASLYVDVEKNISKVKELFSNIESYSISEICSSVINLLTLTASGAPADFKFLGTTIPRKRYGSPQSILSSTLIHQSITGLYETRIDLSQLGGD

SEQ ID NO: 661 - protein, 1370 aa, Streptococcus gallolyticus; identical to SEQ ID NO: 209

SEQ ID NO: 662 - protein, 1375 aa, Streptococcus infantarius
MEKSYSIGLDIGTNSVGWAVITDDYKVPAKKMKVLGNTDKKYIKKNLLGALLFDSGETAEVTRLKRTARRRYTRRKNRLRYLQEIFAKEMTKVDESFFQRLEESFLTDDDKTFDSHPIFGNKAEEDAYHQKFPTIYHLRKYLADSQEKADLRLVYLALAHMIKYRGHFLIEGELNAENTDVQKLFNVFVETYDKIVDESHLSEIEVDASSILTEKVSKSRRLENLIKQYPTEKKNTLFGNLIALALGLQPNFKTNFKLSEDAKLQFSKDTYEEDLEELLGKVGDDYADLFISAKNLYDAILLSGILTVDDNSTKAPLSASMIKRYVEHHEDLEKLKEFIKINKLKLYHDIFKDKTKNGYAGYIDNGVKQDEFYKYLKTILTKIDDSDYFLDKIERDDFLRKQRTFDNGSIPHQIHLQEMHSILRRQGDYYPFLKENQAKIEKILTFRIPYYVGPLARKDSRFAWANYHSDEPITPWNFDEVVDKEKSAEKFITRMTLNDLYLPEEKVLPKHSHVYETFTVYNELTKIKYVNEQGESFFFDANMKQEIFDHVFKENRKVTKAKLLSYLNNEFEEFRINDLIGLDKDSKSFNASLGTYHDLKKILDKSFLDDKTNGQIIEDIVLTLTLFEDRDMIHERLQKYSDFFTSQQLKKLERRHYTGWGRLSYKLINGIRNKENNKTILDFLIDDGHANRNFMQLINDESLSFKTIIQEAQVVGDVDDIEAVVHDLPGSPAIKKGILQSVKIVDELVKVMGDNPDNIVIEMARENQTTGYGRNKSNQRLKRLQDSLKEFGSDILSKKKPSYVDSKVENSHLQNDRLFLYYIQNGKDMYTGEELDIDRLSDYDIDHIIPQAFIKDNSIDNKVLTSSAKNRGKSDDVPSIEIVRNRRSYWYKLYKSGLISKRKFDNLTKAERGGLTEADKAGFIKRQLVETRQITKHVAQILDARFNTKRDENDKVIRDVKVITLKSNLVSQFRKEFKFYKVREINDYHHAHDAYLNAVVGTALLKKYPKLTPEFVYGEYKKYDVRKLIAKSSDDYSEMGKATAKYFFYSNLMNFFKTEVKYADGRVFERPDIETNADGEVVWNKQKDFDIVRKVLSYPQVNIVKKVEAQTGGFSKESILSKGDSDKLIPRKTKKVYWNTKKYGGFDSPTVAYSVLVVADIEKGKAKKLKTVKELVGISIMERSFFEENPVSFLEKKGYHNVQEDKLIKLPKYSLFEFEGGRRRLLASATELQKGNEVMLPAHLVELLYHAHRIDSFNSTEHLKYVSEHKKEFEKVLSCVENFSNLYVDVEKNLSKVRAAAESMTNFSLEEISASFINLLTLTALGAPADFNFLGEKIPRKRYTSTKECLSATLIHQSVTGLYETRIDLSKLGEE

SEQ ID NO: 663 - protein, 1368 aa, Streptococcus iniae
MRKPYSIGLDIGTNSVGWAVITDDYKVPSKKMRIQGTTDRTSIKKNLIGALLFDNGETAEATRLKRTTRRRYTRRKYRIKELQKIFSSEMNELDIAFFPRLSESFLVSDDKEFENHPIFGNLKDEITYHNDYPTIYHLRQTLADSDQKADLRLIYLALAHIIKFRGHFLIEGNLDSENTDVHVLFLNLVNIYNNLFEEDIVETASIDAEKILTSKTSKSRRLENLIAEIPNQKRNMLFGNLVSLALGLTPNFKTNFELLEDAKLQISKDSYEEDLDNLLAQIGDQYADLFIAAKKLSDAILLSDIITVKGASTKAPLSASMVQRYEEHQQDLALLKNLVKKQIPEKYKEIFDNKEKNGYAGYIDGKTSQEEFYKYIKPILLKLDGTEKLISKLEREDFLRKQRTFDNGSIPHQIHLNELKAIIRRQEKFYPFLKENQKKIEKLFTFKIPYYVGPLANGQSSFAWLKRQSNESITPWNFEEVVDQEASARAFIERMTNFDTYLPEEKVLPKHSPLYEMFMVYNELTKVKYQTEGMKRPVFLSSEDKEEIVNLLFKKERKVTVKQLKEEYFSKMKCFHTVTILGVEDRFNASLGTYHDLLKIFKDKAFLDDEANQDILEEIVWTLTLFEDQAMIERRLVKYADVFEKSVLKKLKKRHYTGWGRLSQKLINGIKDKQTGKTILGFLKDDGVANRNFMQLINDSSLDFAKIIKNEQEKTIKNESLEETIANLAGSPAIKKGILQSIKIVDEIVKIMGQNPDNIVIEMARENQSTMQGIKNSRQRLRKLEEVHKNTGSKILKEYNVSNTQLQSDRLYLYLLQDGKDMYTGKELDYDNLSQYDIDHIIPQSFIKDNSIDNTVLTTQASNRGKSDNVPNIETVNKMKSFWYKQLKSGAISQRKFDHLTKAERGALSDFDKAGFIKRQLVETRQITKHVAQILDSRFNSNLTEDSKSNRNVKIITLKSKMVSDFRKDFGFYKLREVNDYHHAQDAYLNAVVGTALLKKYPKLEAEFVYGDYKHYDLAKLMIQPDSSLGKATTRMFFYSNLMNFFKKEIKLADDTIFTRPQIEVNTETGEIVWDKVKDMQTIRKVMSYPQVNIVMKTEVQTGGFSKESIWPKGDSDKLIARKKSWDPKKYGGFDSPIIAYSVLVVAKIAKGKTQKLKTIKELVGIKIMEQDEFEKDPIAFLEKKGYQDIQTSSIIKLPKYSLFELENGRKRLLASAKELQKGNELALPNKYVKFLYLASHYTKFTGKEEDREKKRSYVESHLYYFDEIMQIIVEYSNRYILADSNLIKIQNLYKEKDNFSIEEQAINMLNLFTFTDLGAPSAFKFFNGDIDRKRYSSTNEIINSTLIYQSPTGLYETRIDLSKLGGK

SEQ ID NO: 664 - protein, 1392 aa, Streptococcus mitis
MNNNNYSIGLDIGTNSVGWAVITDDYKVPSKKMKVLGNTDKHFIKKNLIGALLFDEGATAEDRRFKRTARRRYTRRKNRLRYLQEIFSEEMSKVDSSFFHRLDDSFLVPEDKRGSKYPIFATLAEEKEYHKKFPTIYHLRKHLADSKEKTDLRLIYLALAHMIKYRGHFLYEESFDIKNNDIQKIFSEFISIYDNTFEGSSLSGQNAQVEAIFTDKISKSAKRERILKLFAYEKSTDLFSEFLKLIVGNQADFKKHFDLEEKAPLQFSKDTYDEDLENLLGQIGDDFADLFLVAKKLYDAILLSGILTVTDSSTKAPLSASMIERYENHQKDLAALKQFIQNNLQEKYDEVFSDQSKDGYARYINGKTTQEAFYKYIKNLLSKFEGSDYFLDKIEREDFLRKQRTFDNGSIPHQIHLQEMNAIIRRQGEHYPFLKEYKEKIETILTFRIPYYVGPLARGNRNFAWLTRNSDQAIRPWNFEEIVDQASSAEEFINKMTNYDLYLPEEKVLPKHSLLYETFAVYNELTKVKFISEGLRDYQFLDSGQKKQIVNQLFKEKRKVTEKDIIQYLHNVDGYDGIELKGIEKQFNASLSTYHDLLKIIKDKEFMDDPKNEEILENIVHTLTIFEDREMIKQRLAQYASIFDKKVIKALTRRHYTGWGKLSAKLINGICDKKTGKTILDYLIDDGYSNRNFMQLINDDGLSFKDIIQKAQVVGKTNDVKQVVQELPGSPAIKKGILQSIKLVDELVKVMGHAPESIVIEIARENQTTARGKKNSQQRYKRIEDALKNLAPGLDSNILKEHPTDNIQLQNDRLFLYYLQNGKDMYTGEALDINQLSSYDIDHIVPQAFIKDDSLDNRVLTSSKDNRGKSDNVPSLEVVQKRKAFWQQLLDSKLISEHKFNNLTKAERGGLDERDKVGFIRRQLVETRQITKHVAQILDARFNTEVNEKDKKNRTVKIITLKSNLVSNFRKEFKLYKVREINDYHHAHDAYLNAVVAKAILKKYPKLEPGFVYGDYQKYDIKRYISRSKDPKEVEKATEKYFFYSNLLNFFKEEVHYADGTIVKRENIEYSKDTGEIAWNKEKDFATIKKVLSLPQVNIVKKTEIQTHGLDRGKPRGLFNSNPSPKPSEDRKENLVPIKQGLDPRKYGGYAGISNSYAVLVKAIIEKGAKKQQKTVLEFQGISILDKINFEKNKENYLLEKGYIKILSTITLPKYSLFEFPDGTRRRLASILSTNNKRGEIHKGNELVIPEKYTTLLYHAKNINKTLEPEHLEYVEKHRNDFAKLLEYVLNFNDKYVGALKNGERIRQAFIDWETVDIEKLCFSFIGPRNSKNAGLFELTSQGSASDFEFLGVKIPRYRDYTPSSLLNATLIHQSITGLYETRIDLSKLGED

SEQ ID NO: 665 - protein, 1134 aa, Streptococcus mutans
MANGKILGLDIGIASVGVGIIDKETGKIIHVNSRIFPAATADSNVERRGFRQGRRLVRRKKHRKVRLADLFLDSNLLTDFSKVSLNLNPYQLRVKGLNEELSNEELFIALKSIVSRRGISYLDDASEDSGANSSEYGKAVEENRKLLEDRTPGQIQLERFEKYGKVRGDFTVVENGENHRLINVFSTSAYKKEAERILRRQQEFNMRIADEFIEAYLTILTGKRKYYHGPGNEKSRTDYGRFRTDGTTLDNIFGILIGKCTFYPDEYRAAKASYTAQEFNLLNDLNNLTVPTETKKLSEEQKRQIIEHAKTVKTLGAPTLLKYIVKLVGCSADDIKGYRIDKSDKPEIHTFEAYRKMRTMELIKVDDLSRESLDALAHILTLNTEREGIEEAIRDRFTNKEFNQEQINELVLFRKNNSSLFGKGWHNFSLKLMKELIPELYETSEEQMTILTRLGKQRVKKSSNRTNYIDEKELTEEIYNPVVAKSVRQAIKIINLATKKYGVFDNIVIEMARESNEDDEKKAIQNAQKANEDEKKAALLKAAHQFNGKEELPDSIFHGHKELLTKIRLWHQQGEKCLYTGKTIFINDLIHNPYKYEIDHILPLSLSFDDSLANKVLVLSTANQEKGQRTPFQSLDSMDGAWTYREFKSYVKGLKTLSNKKKDYLLTEENIDKIEVKQKFIERNLVDTRYSSRVVLNALQDFYKERKFDTKISVVRGQFTSQLRRKWRIEKTRETYHHHAVDALIIAASSQLNLWKKQNNPLISYKEDQFVDPETGEILSLSDDEYKKLVFKAPYEHFVDTLKSKKFEDSILFSYQVDSKYNRKISGATICGTRKAQLGKDTQEETYVLGKIKDIYSQKGYEDFIKKYKKDKTQFLMYHKDPQTFEKVIEEILKTYPDKELNEKGKEVSCNPFEKYRQENGPVRKYSKKGNGPEIKSLKYYDEVLGKNIDITPKNSLNKVVLRSLNPWRTDVYFNHETRKYEFLGLKYSDLRYLKGEHRYGILIGDYKKIKDKEGIEKESEFKFTLYKNDLILIKDTAKGKEELFRFWSRTGKDNAKTFEKNKIELKPYSKSQFEKGEDTNVLGKLYASSNQLQKSFGTLENLSIYKVRTDVLGNKYFIKKEGDKPQLNFKKKL

SEQ ID NO: 666 - protein, 1134 aa, Streptococcus mutans; identical to SEQ ID NO: 665

SEQ ID NO: 667 - protein, 1128 aa, Streptococcus mutans
MANSKILGLDIGIASVGVGIIDKETGKIIHVNSRIFPAATADSNVERRGFRQGRRLVRRKKHRKVRLADLFLDSNLLTDFSKVSLNLNPYQLRVKGLNEELSNEELFIALKSIVSRRGISYLDDASEDSGANSSEYGKAVEENRKLLEDRTPGQIQLERFEKYGKVRGDFTVVENGENHRLINVFSTSAYKKEAERILRRQQEFNIRIADEFIEAYLTILTGKRKYYHGPGNEKSRTDYGRFRTDGTTLDNIFGILIGKCTFYPDEYRAAKASYTAQEFNLLNDLNNLTVPTETKKLSEEQKRQIIEHAKTVKTLGAPTLLKYIAKLVGCSADDIKGYRIDKSDKPEIHTFEAYRKMRTMELIKVADLSRESLDALAHILTLNTEREGIEEAIRDRFTNKEFNQEQINELVLFRKNNSSLFGKGWHNFSLKLMKELIPELYETSEEQMTILTRLGKQRVKKSSNRTNYIDEKELTEEIYNPVVAKSVRQAIKIINLATKKYGVFDNIVIEMARESNEDDEKKAIQNAQKANEDEKEAALLKAAHQFNGKEELPDSIFHGHKELLTKIRLWHQQGEKCLYTGKTIFINDLIHNPYKYEIDHILPLSLSFDDSLANKVLVLSTANQEKGQRTPFQSLDSMDGAWTYREFKAYVKGLKTLSNKKKDYLLNEEDINKNEVKQKFIERNLVDTRYSSRVVLNTLQDFYKKREFDTKISVVRGQFTSQIRRKWRIEKTRETYHHHAVDALIIAASSQLNLWKKQNNPLISYKEDQFVDPETGEILSLSDDEYKELVFKAPYDHFVDTLKSKKFEDSILFSYQVDSKYNRKISDATIYGTRKARLGKDSQEETYVLGKIKDIYSQKGYEDFIKKYKKDKTQFLMYHKDPQTFEKVIEEILKTYSDKELNEKGKEVPCNPFEKYRQENGPVRKYSKKGNGPEIKSIKYYDNKLGNHIDITPNNSHHQVVLQSLKPWRTDVYFNPKSGKYELMGLKYSDLRFEKVSGDYGISVKKYNEIKSKEGVDENSEFKFTLYKNDLILIKDTESGEQELFRFLSRTMPNQKHYVELKPYDKSKFEGHQKLMDIFGEVAKGGQCLKGLNKSNISIYKVKTDVLGNKYFIKKEGDQPQLNFKKKI

SEQ ID NO: 668 - protein, 1128 aa, Streptococcus mutans; identical to SEQ ID NO: 667

SEQ ID NO: 669 - protein, 1338 aa, Streptococcus mutans
MDLIGTNSVGWAVVTDDYKVPAKKMKVLGNTDKSHIKKNLLGALLFDSGNTAADRRLKRTARRRYTRRRNRILYLQEIFAEEMSKVDDSFFHRLEDSFLVTEDKRGERHPIFGNLEEEVKYHENFPTIYHLRQYLADNPEKVDLRLVYLALAHIIKFRGHFLIEGKFDTRNNDVQRLFQEFLAVYDNTFENSSLQEQNVQVEEILTDKISKSAKKDRVLKLFPNEKSNGRFAEFLKLIVGNQADFKKHFELEEKAPLQFSKDTYEEELEVLLAQIGDNYAELFLSAKKLYDSILLSGILTVTDVSTKAPLSASMIQRYNEHQMDLAQLKQFIRQKLSDKYNEVFSDVSKDGYAGYIDGKTNQEAFYKYLKGLLNKIEGSGYFLDKIEREDFLRKQRTFDNGSIPHQIHLQEMRAIIRRQAEFYPFLADNQDRIEKILTFRIPYYVGPLARGKSDFAWLSRKSADKITPWNFDEIVDKESSAEAFINRMTNYDLYLPNQKVLPKHSLLYEKFTVYNELTKVKYKTEQGKTAFFDANMKQEIFDGVFKVYRKVTKDKLMDFLEKEFDEFRIVDLTGLDKENKAFNASYGTYHDLRKILDKDFLDNSKNEKILEDIVLTLTLFEDREMIRKRLENYSDLLTKEQVKKLERRHYTGWGRLSAELIHGIRNKESRKTILDYLIDDGNSNRNFMQLINDDALSFKEEIAKAQVIGETDNLNQVVSDIAGSPAIKKGILQSLKIVDELVKIMGHQPENIVVEMARENQFTNQGRRNSQQRLKGLTDSIKEFGSQILKEHPVEHSQLQNDRLFLYYLQNGRDMYTGEELDIDYLSQYDIDHIIPQAFIKDNSIDNRVLTSSKENRGKSDDVPSKNVVRKMKSYWSKLLSAKLITQRKFDNLTKAERGGLTDDDKAGFIKRQLVETRQITKHVARILDERFHTETDENNKKIRQVKIVTLKSNLVSNFRKEFELYKVREINDYHHAHDAYLNAVIGKALLGVYPQLEPEFVYGDYPHFHGHKENKATAKKFFYSNIMNFFKKDDVRTDKNGEIIWKKDEHISNIKKVLSYPQVNIVKKVEEQTGGFSKESILPKGNSDKLIPRKTKKFYWDTKKYGGFDSPIVAYSILVIADIEKGKSKKLKTVKALVGVTIMEKMTFERDPVAFLERKGYRNVQEENIIKLPKYSLFKLENGRKRLLASARELQKGNEIVLPNHLGTLLYHAKNIHKVDEPKHLDYVDKHKDEFKELLDVVSNFSKKYTLAEGNLEKIKELYAQNNGEDLKELASSFINLLTFTAIGAPATFKFFDKNIDRKRYTSTTEILNATLIHQSITGLYETRIDLSKLGGD

SEQ ID NO: 670 - protein, 1338 aa, Streptococcus mutans; identical to SEQ ID NO: 669

SEQ ID NO: 671 - protein, 1345 aa, Streptococcus mutans
MKKPYSIGLDIGTNSVGWAVVTDDYKVPAKKMKVLGNTDKSHIEKNLLGALLFDSGNTAEDRRLKRTARRRYTRRRNRILYLQEIFSEEMGKVDDSFFHRLEDFFLVTEDKRGERHPIFGNLEEEVKYHENFPTIYHLRQYLADNPEKVDLRLVYLALAHIIKFRGHFLIEGKFDTRNNDVQRLFQEFLAVYDNTFENSSLQEQNVQVEEILTDKISKSAKKDRVLKLFPNEKSNGRFAEFLKLIVGNQADFKKHFELEEKAPLQFSKDTYEEELEVLLAQIGDNYAELFLSAKKLYDSILLSGILTADDSSTKAPLSASMIQRYNEHQMDLAQLKQFIRQKLSDKYNEVFSDVSKDGYAGYIDGKTNQEAFYKYLKGLLNKIEGSGYFLDKIEREDFLRKQRTFDNGSIPHQIHLQEMRAIIRRQSEFYPFLADNQDRIEKILTFRIPYYVGPLARGKSDFAWLSRKSADKITPWNFDEIVDKESSAEAFINRMTNYDLYLPNQKVLPKHSLLYEKFTVYNELTKVKYKTEQGETAFFDANMKQEIFDGVFKVYRKVTKDKLMDFLEKEFDEFRIVDLTGLDKENKAFNASYGTYHDLRKILDKDFLDNSKNEKILEDIVLTLTLFEDREMIRKRLKNYSDLLTKEQLKKLERRHYTGWGRLSAELIHGIRNKESRKTILDYLIDDGNSNRNFMQLINDDALSFKEEIAKAQVIGETDNLNQVVSDIAGSPAIKKGILQSLKIVDELVKIMGHQPENIVVEMARENQFTNQGRRNSQQRLKGLTDSIKEFGSQILKEHPVENSQLQNDRLFLYYLQNGRDMYTGEELDIDYLSQYDIDHIIPQAFIKDNSIDNRVLTSSKENRGKSDDVPSKDVVRKMKPYWSKLLSAKLITQRKFDNLTKAERGGLTDDDKAGFIKRQLVETRQITKHVARILDERFNTETDENNKKIRQVKIVTLKSNLVSNFRKEFELYKVREINDYHHAHDAYLNAVIGKALLGVYPQLEPEFVYGDYPHFHGHEENKATAKKFFYSNIMNFFKKDDVRTDKNGEIIWKKDEHISNIKKVLSYPQVNIVKKVEEQTGGFSKESILPKGNSDKLIPRKTKKFYWDTKKYGGFDSPIVAYSILVIADIEKGKSKKLKTVKALVGVTIMEKMTFERDPVAFLERKGYRNVQEENIIKLPKYSLFKLENGRKRLLASARELQKGNEIVLPNHLGTLLYHAKNIHKVDEPKHLDYVDKHKDEFKELLDVVSNFSKKYTLAEGNLEKIKELYAQNNGEDLKELASSFINLLTFTAIGAPATFKFFDKNIDRKRYTSTTEILNATLIHQSITGLYETRIDLSKLGGD

SEQ ID NO: 672 - protein, 1345 aa, Streptococcus mutans; identical to SEQ ID NO: 671

SEQ ID NO: 673 - protein, 1229 aa, Streptococcus mutans
MKKPYSIGLDIGTNSVGWAVVTDDYKVPAKKMKVLGNTDKSHIEKNLLGALLFDSGNTAEDRRLKRTARRRYTRRRNRILYLQEIFSEEMGKVDDSFFHRLEDSFLVTEDKRGERHPIFGNLEEEVKYHENFPTIYHLRQYLADNPEKVDLRLVYLALAHIIKFRGHFLIEGKFDTRNNDVQRLFQEFLAVYDNTFENSSLQEQNIQVEEILTDKISKSAKKDRVLKLFPNEKSNGRFAEFLKLIVGNQADFKKHFELEEKAPLQFSKDTYEEELEVLLAQIGDNYAELFLSAKKLYDSILLSGILTVTDVGTKAPLSASMIQRYNEHQMDLTQLKQFIRQKLSDKYNEVFSDVSKDGYAGYIDGKTNQEAFYKYLKGLLNKIEGSGYFLDKIEREDFLRKQRTFDNGSIPHQIHLQEMRAIIRRQAEFYPFLADNQDRIEKILTFRIPYYVGPLARGKSDFAWLSRKSADKITPWNFDEIVDKESSAEAFINRMTNYDLYLPNQKVLPKHSLLYEKFTVYNELTKVKYKTEQGKTAFFDANMKQEIFDGVFKVYRKVTKDKLMDFLEKEFDEFRIVDLTGLDKENKVFNASYGTYHDLCKILDKDFLDNSKNEKILEDIVLTLTLFEDREMIRKRLENYSDLLTKEQVKKLERRHYTGWGRLSAELIHGIRNKESRKTILDYLIDDGNSNRNFMQLINDDALSFKEEIAKAQVIGETDNLNQVVSDIAGSPAIKKGILQSLKIVDELVKIMGHQPENIVVEMARENQFTNQGRRNSQQRLKGLTDSIKEFGSQILKEHPVENSQLQNDRLFLYYLQNGRDMYTGEELDIDYLSQYDIDHIIPQAFIKDNSIDNRVLTSSKENRGKSDDVPSKDVVRKMKPYWSKLLSAKLITQRKFDNLTKAERGGLTDDDKAGFIKRQLVETRQITKHVARILDERFNTETDENNKKIRQVKIVTLKSNLVSNFRKEFELYKVREINDYHHAHDAYLNAVIGKALLGVYPQLEPEFVYGDYPHFHGHEENKATAKKFFYSNIMNFFKKDDVRTDKNGEIIWKKDEHISNIKKVLSYPQVNIVKKVEEQTIGQNGGLFDDNPKSPLEVIPSKLVPLKKALNPEKYGGYQKPTTAYPILLIVDTKQLIPISVMDKKRFEQNPVKFLKDKGYQQIEKNNFVKLPKYTLVDIGNGIKRLWASSKEVHKGNQLVVSKKSQDLLYHAHHLDNDYSNEYVKNHY

SEQ ID NO: 674 - protein, 1229 aa, Streptococcus mutans; identical to SEQ ID NO: 673

SEQ ID NO: 675 - protein, 1345 aa, Streptococcus mutans
MKKPYSIGLDIGTNSVGWAVVTDDYKVPAKKMKVLGNTDKSHIEKNLLGALLFDSGNTAEDRRLKRTARRRYTRRRNRILYLQEIFSEEMGKVDDSFFHRLEDSFLVTEDKRGERHPIFGNLEEEVKYHENFPTIYHLRQYLADNPEKVDLRLVYLALAHIIKFRGHFLIEGKFDTRNNDVQRLFQEFLAVYDNTFENSSLQEQNVQVEEILTDKISKSAKKDRVLKLFPNEKSNGRFAEFLKLIVGNQADFKKHFELEEKAPLQFSKDTYEEELEVLLAQIGDNYAELFLSAKKLYDSILLSGILTVTDVGTKAPLSASMIQRYNEHQMDLAQLKQFIRQKLSDKYNEVFSDVSKDGYAGYIDGKTNQEAFYKYLKGLLNKIEGSGYFLDKIEREDFLRKQRTFDNGSIPHQIHLQEMRAIIRRQAEFYPFLADNQDRIEKLLTFRIPYYVGPLARGKSDFAWLSRKSADKITPWNFDEIVDKESSAEAFINRMTNYDLYLPNQKVLPKHSLLYEKFTVYNELIKVKYKTEQGKTAFFDANMKQEIFDGVFKVYRKVTKDKLMDFLEKEFDEFRIVDLTGLDKENKVFNASYGTYHDLCKILDKDFLDNSKNEKILEDIVLTLTLFEDREMIRKRLENYSDLLTKEQVKKLERRHYTGWGRLSAELIHGIRNKESRKTILDYLIDDGNSNRNFMQLINDDALSFKEEIAKAQVIGETDNLNQVVSDIAGSPAIKKGILQSLKIVDELVKIMGHQPENIVVEMARENQFTNQGRRNSQQRLKGLTDSIKEFGSQILKEHPVENSQLQNDRLFLYYLQNGRDMYTGEELDIDYLSQYDIDHIIPQAFIKDNSIDNRVLTSSKENRGKSDDVPSKDVVRKMKSYWSKLLSAKLITQRKFDNLTKAERGGLTDDDKAGFIKRQLVETRQITKHVARILDERFNTETDENNKKIRQVKIVTLKSNLVSNFRKEFELYKVREINDYHHAHDAYLNAVIGKALLGVYPQLEPEFVYGDYPHFHGHKENKATAKKFFYSNIMNFFKKDDVRTDKNGEIIWKKDEHISNIKKVLSYPQVNIVKKVEEQTGGFSKESILPKGNSDKLIPRKTKKFYWDTKKYGGFDSPIVAYSILVIADIEKGKSKKLKTVKALVGVTIMEKMTFERDPVAFLERKGYRNVQEENIIKLPKYSLFKLENGRKRLLASARELQKGNEIVLPNHLGTLLYHAKNIHKVDEPKHLDYVDKHKDEFKELLDVVSNFSKKYTLAEGNLEKIKELYAQNNGEDLKELASSFINLLTFTAIGAPATFKFFDKNIDRKRYTSTTEILNATLIHQSITGLYETRIDLNKLGGD

SEQ ID NO: 676 - protein, 1350 aa, Streptococcus mutans
MKKPYSIGLDIGTNSVGWAVVTDDYKVPAKKMKVLGNTDKSHIEKNLLGALLFDSGNTAEDRRLKRTARRRYTRRRNRILYLQEIFSEEMGKVDDSFFHRLEDSFLVTEDKRGERHPIFGNLEEEVKYHENFPTIYHLRQYLADNPEKVDLRLVYLALAHIIKFRGHFLIEGKFDTRNNDVQRLFQEFLAVYDNTFENSSLQEQNVQVEEILTDKISKSAKKDRVLKLFPNEKSNGRFAEFLKLIVGNQADFKKHFELEEKAPLQFSKDTYEEELEVLLAQIGDNYAELFLSAKKLYDSILLSGILTVTDVSTKAPLSASMIQRYNEHQMDLTQLKQFIRQKLSDKYNEVFSDVSKDGYAGYIDGKTNQEAFYKYLKGLLNKIEGSGYFLDKIEREDFLRKQRTFDNGSIPHQIHLQEMRAIIRRQAEFYSFLADNQDRIEKILTFRIPYYVGPLARGKSDFAWLSRKSADKITPWNFDEIVDKESSAEAFINRMTNYDLYLPNQKVLPKHSLLYEKFTVYNELTKVKYKTEQGKTAFFDANMKQEIFDGVFKVYRKVTKDKLMDFLEKEFDEFRIVDLTGLDKENKAFNASYGTYHDLRKILDKDFLDNSKNEKILEDIVLTLTLFEDREMIRKRLENYSDLLTKEQVKKLERRHYTGWGRLSAELIHGIRNKESRKTILDYLIDDGNSNRNFMQLINDDALSFKEEIAKAQVIGETDNLNQVVSDIAGSPAIKKGILQSLKIVDELVKIMGHQPENIVVEMARENQFTNQGRRNSQQRLKGLTDSIKEFGSQILKEHPVENSQLQNDRLFLYYLQNGRDMYTGEELDIDYLSQYDIDHIIPQAFIKDNSIDNRVLTSSKENRGKSDDVPSEDVVNRMRPFWNKLLSSGLISQRKYNNLTKKELTLDDKAGFIKRQLVETRQITKHVARMLDERFNKEFDDNNKRIRKVKIVTLKSNLVSSFRKEFELYKVREINDYHHAHDAYLNAVVVKALLVKYSKLEPEFVYGEYPKYNSYRERKTATQKMFFYSNIMNMFKSKVKLADDQIVERPMIEVNDETGEIAWDKTKHITTVKKVLSYPQVNIVKKVEEQTIGQNGGLFDDNPKSPLEVIPSKLVPLKKALNPEKYGGYQKPTTAYPILLIVDTKQLIPISVMDKKRFEQNPVKFLKDKGYQQIEKNNFVKLPKYTLVDIGNGIKRLWASSKEVHKGNQLVVSKKSQDLLYHAHHLDNDYSNEYVKNHYQQFDILFNEITSFSKKCKLGKEHIQKIEEAYSKERDSASIEELADGFIKLLGFTQLGATSPFSFLGIKLNQKQYTGKKDYLLPCMEATLIHQSITGLYETRIDLSKLGGD

SEQ ID NO: 677 - protein, 1350 aa, Streptococcus mutans
MKKPYSIGLDIGTNSVGWAVVTDDYKVPAKKMKVLGNTDKSHIEKNLLGALLFDSGNTAEDRRLKRTARRRYTRRRNRILYLQEIFSEEMGKVDDSFFHRLEDSFLVTEDKRGERHPIFGNLEEEVKYHENFPTIYHLRQYLADNPEKVDLRLVYLALAHIIKFRGHFLIEGKFDTRNNDVQRLFQEFLAVYDNTFENSSLQEQNVQVEEILTDKISKSAKKDRVLKLFPNEKSNGRFAEFLKLIVGNQADFKKHFELEEKAPLQFSKDTYEEELEVLLAQIGDNYAELFLSAKKLYDSILLSGILTVTDVSTKAPLSASMIQRYNEHQMDLTQLKQFIRQKLSDKYNEVFSDVSKDGYAGYIDGKTNQEAFYKYLKGLLNKIEGSGYFLDKIEREDFLRKQRTFDNGSIPHQIHLQEMRAIIRRQAEFYPFLADNQDRIEKILTFRIPYYVGPLARGKSDFAWLSRKSADKITPWNFDEIVDKESSAEAFINRMTNYDLYLPNQKVLPKHSLLYEKFTVYNELTKVKYKTEQGKTAFFDANMKQEIFDGVFKVYRKVTKDKLMDFLEKEFDEFRIVDLTGLDKENKAFNASYGTYHDLRKILDKDFLDNSKNEKILEDIVLTLTLFEDREMIRKRLKNYSDLLTKEQLKKLERRHYTGWGRLSAELIHGIRNKESRKTILDYLIDDGNSNRNFMQLINDDALSFKEEIAKAQVIGETDNLNQVVSDIAGSPAIKKGILQSLKIVDELVKIMGHQPENIVVEMARENQFTNQGRQNSQQRLKGLTDSIKEFGSQILKEHPVENSQLQNDRLFLYYLQNGRDMYTGEELDIDYLSQYDIDHIIPQAFIKDNSIDNRVLTSSKENRGKSDDVPSEDVVNRMRPFWNKLLSSGLISQRKYNNLTKKELTLDDKAGFIKRQLVETRQITKHVARMLDERFNKEFDDNNKRICKVKIVTLKSNLVSSFRKEFELYKVREINDYHHAHDAYLNAVVVKALLVKYSKLEPEFVYGEYPKYNSYRERKTATQKMFFYSNIMNMFKSKVKLADDQIVERPMIEVNDETGEIAWDKTKHITTVKKVLSYPQVNIVKKVEEQTIGQNGGLFDDNPKSPLEVIPSKLVPLKKALNPEKYGGYQKPTTAYPILLIVDTKQLIPISVMDKKRFEQNPVKFLKDKGYQQIEKNNFVKLPKYTLVDIGNGIKRLWASSKEVHKGNQLVVSKKSQDLLYHAHHLDNDYSNEYVKNHYQQFDILFNEITSFSKKCKLGKEHIQKIEEAYSKERDSASIEELADGFIKLLGFTQLGATSPFSFLGIKLNQKQYTGKKDYLLPCMEATLIHQSITGLYETRIDLSKLGGD

SEQ ID NO: 678 - protein, 1345 aa, Streptococcus mutans; identical to SEQ ID NO: 675

SEQ ID NO: 679 - protein, 1350 aa, Streptococcus mutans; identical to SEQ ID NO: 676

SEQ ID NO: 680 - protein, 1350 aa, Streptococcus mutans; identical to SEQ ID NO: 677

SEQ ID NO: 681 - protein, 1345 aa, Streptococcus mutans
MKKPYSIGLDIGTNSVGWAVVTDDYKVPAKKMKVLGNTDKSHIKKNLLGALLFDSGNTAADRRLKRTARRRYTRRRNRILYLQEIFAEEMSKVDDSFFHRLEDSFLVTEDKRGERHPIFGNLEEEVKYHENFPTIYHLRQYLADNPEKVDLRLVYLALAHIIKFRGHFLIEGKFDTRNNDVQRLFQEFLAVYDNTFENSSLQEQNVQVEEILTDKISKSAKKDRVLKLFPNEKSNGRFAEFLKLIVGNQADFKKHFELEEKAPLQFSKDTYEEELEVLLTQIGDNYAELFLSAKKLYDSILLSGILTVTDVSTKAPLSASMIQRYNEHQMDLAQLKQFIRQKLSDKYNEVFSDVSKDGYAGYIDGKTNQEAFYKYLKGLLNKIEGSGYFLDKIEREDFLRKQRTFDNGSIPHQIHLQEMRAIIRRQAEFYPFLADNQDRIEKILTFRIPYYVGPLARGKSDFAWLSRKSADKITPWNFDEIVDKESSAEAFINRMTNYDLYLPNQKVLPKHSLLYEKFTVYNELTKVKYKTEQGKTAFFDANMKQEIFDGVFKVYRKVTKDKLMDFLEKEFDEFRIVDLTGLDKENKAFNASYGTYHDLRKILDKDFLDNSKNEKILEDIVLTLTLFEDREMIRKRLENYSDLLTKEQVKKLERRHYTGWGRLSAELIHGIRNKESRKTLLDYLIDDGNSNRNFMQLINDDALSFKEEIAKAQVIGETDNLNQVVSDIAGSPAIKKGILQSLKIVDELVKIMGHQPENIVVEMARENQFTNQGRRNSQQRLKGLTDSIKEFGSQILKEHPVENSQLQNDRLFLYYLQNGRDMYTGEELDIDYLSQYDIDHIIPQAFIKDNSIDNRVLTSSKENRGKSDDVPSKDVVRKMKPYWSKLLSAKLITQRKFDNLTKAERGGLTDDDKAGFIKRQLVETRQITKHVARILDERFNTETDENNKKIRQVKIVTLKSNLVSNFRKEFELYKVREINDYHHAHDAYLNAVIGKALLGVYPQLEPEFVYGDYPHFHGHEENKATAKKFFYSNIMNFFKKDDVRTDKNGEIIWKKDEHISNIKKVLSYPQVNIVKKVEEQTGGFSKESILPKGNSDKLIPRKTKKFYWDTKKYGGFDSPIVAYSILVIADIEKGKSKKLKTVKALVGVTIMEKMTFERDPVAFLERKGYRNVQEENIIKLPKYSLFKLENGRKRLLASARELQKGNEIVLPNHLGTLLYHAKNIHKVDEPKHLDYVDKHKDEFKELLDVVSNFSKKYTLAEGNLEKIKELYAQNNGEDLKELSSSFINLLTFTAIGAPAAFKFFDKNIDRKRYTSTTEILNATLIHQSITGLYETRIDLSKLGGD

SEQ ID NO: 682 - protein, 1345 aa, Streptococcus mutans
MKKPYSIGLDIGTNSVGWAVVTDDYKVPAKKMKVLGNTDKSHIKKNLLGALLFDSGNTAADRRLKRTARRRYTRRRNRILYLQEIFAEEMSKVDDSFFHRLEDSFLVTEDKRGERHPIFGNLEEEVKYHENFPTIYHLRQYLADNPEKVDLRLVYLALAHIIKFRGHFLIEGKFDTRNNDVQRLFQEFLAVYDNTFENSSLQEQNVQVEEILTDKISKSAKKDRVLKLFPNEKSNGRFAEFLKLIVGNQADFKKHFELEEKAPLQFSKDTYEEELEVLLAQIGDNYAELFLSAKKLYDSILLSGILTVTDVSTKAPLSASMIQRYNEHQMDLAQLKQFIRQKLSDKYNEVFSDVSKDGYAGYIDGKTNQEAFYKYLKGLLNKIEGSGYFLDKIEREDFLRKQRTFDNGSIPHQIHLQEMRAIIRRQAEFYPFLADNQDRIEKILTFRIPYYVGPLARGKSDFAWLSRKSADKITPWNFDEIVDKESSAEAFINRMTNYDLYLPNQKVLPKHSLLYEKFTVYNELTKVKYKTEQGKTAFFDANMKQEIFDGVFKVYRKVTKDKLMDFLEKEFDEFRIVDLTGLDKENKAFNASYGTYHDLRKILDKDFLDNSKNEKILEDIVLTLTLFEDREMIRKRLENYSDLLTKEQVKKLERRHYTGWGRLSAELIHGIRNKESRKTILDYLIDDGNSNRNFMQLINDDALSFKEEIAKAQVIGETDNLNQVVSDIAGSPAIKKGILQSLKIVDELVKIMGHQPENIVVEMARENQFTNQGRRNSQQRLKGLTDSIKEFGSQILKEHPVEHSQLQNDRLFLYYLQNGRDMYTGEELDIDYLSQYDIDHIIPQAFIKDNSIDNRVLTSSKENRGKSDDVPSKNVVRKMKSYWSKLLSAKLITQRKFDNLTKAERGGLTDDDKAGFIKRQLVETRQITKHVARILDERFHTETDENNKKIRQVKIVTLKSNLVSNFRKEFELYKVREINDYHHAHDAYLNAVIGKALLGVYPQLEPEFVYGDYPHFHGHKENKATAKKFFYSNIMNFFKKDDVRTDKNGEIIWKKDEHISNIKKVLSYPQVNIVKKVEEQTGGFSKESILPKGNSDKLIPRKTKKFYWDTKKYGGFDSPIVAYSILVIADIEKGKSKKLKTVKALVGVTIMEKMTFERDPVAFLERKGYRNVQEENIIKLPKYSLFKLENGRKRLLASARELQKGNEIVLPNHLGTLLYHAKNIHKVDEPKHLDYVDKHKDEFKELLDVVSNFSKKYTLAEGNLEKIKELYAQNNGEDLKELASSFINLLTFTAIGAPATFKFFDKNIDRKRYTSTTEILNATLIHQSITGLYETRIDLSKLGGD

SEQ ID NO: 683 - protein, 1345 aa, Streptococcus mutans
MKKPYSIGLDIGTNSVGWAVVTDDYKVPAKKMKVLGNTDKSHIKKNLLGALLFDSGNTAADRRLKRTARRRYTRRRNRILYLQEIFAEEMSKVDDSFFHRLEDSFLVTEDKRGERHPIFGNLEEEVKYHENFPTIYHLRQYLADNPEKVDLRLVYLALAHIIKFRGHFLIEGKFDTRNNDVQRLFQEFLAVYDNTFENSSLQEQNVQVEEILTDKISKSAKKDRVLKLFPNEKSNGRFAEFLKLIVGNQADFKKHFELEEKAPLQFSKDTYEEELEVLLAQIGDNYAELFLSAKKLYDSILLSGILTVTDVSTKAPLSASMIQRYNEHQMDLAQLKQFIRQKLSDKYNEVFSDVSKDGYAGYIDGKTNQEAFYKYLKGLLNKIEGSGYFLDKIEREDFLRKQRTFDNGSIPHQIHLQEMRAIIRRQAEFYPFLADNQDRIEKILTFRIPYYVGPLARGKSDFAWLSRKSADKITPWNFDEIVDKESSAEAFINRMTNYDLYLPNQKVLPKHSLLYEKFTVYNELTKVKYKTEQGKTAFFDANMKQEIFDGVFKVYRKVTKDKLMDFLEKEFDEFRIVDLTGLDKENKVFNASYGTYHDLCKILDKDFLDNSKNEKILEDIVLTLTLFEDREMIRKRLENYSDLLTKEQVKKLERRHYTGWGRLSAELIHGIRNKESRKTILDYLIDDGNSNRNFMQLINDDALSFKEEIAKAQVIGETDNLNQVVSDIAGSPAIKKGILQSLKIVDELVKIMGHQPENIVVEMARENQFTKQGRRNSQQRLKGLTDSIKEFGSQILKEHPVENSQLQNDRLFLYYLQNGRDMYTGEELDIDYLSQYDIDHIIPQAFIKDNSIDNRVLTSSKENRGKSDDVPSKDVVRKMKSYWSKLLSAKLITQRKFDNLTKAERGGLTDDDKAGFIKRQLVETRQITKHVARILDERFYTETDENNKKIRQVKIVTLKSNLVSNFRKEFELYKVREINDYHHAHDAYLNAVIGKALLGVYPQLEPEFVYGDYPHFHGHKENKATAKKFFYSNIMNFFKKDDVRTDKNGEIIWKKDEHISNIKKVLSYPQVNIVKKVEEQTGGFSKESILPKGNSDKLIPRKTKKFYWDTKKYGGFDSPIVAYSILVIADIEKGKSKKLKTVKALVGVTIMEKMTFERDPVAFLERKGYRNVQEENIIKLPKYSLFKLENGRKRLLASARELQKGNEIVLPNHLGTLLYHAKNIHKVDEPKHLDYVDKHKDEFKELLDVVSNFSKKYTLAEGNLEKIKELYAQNNGEDLKELASSFINLLTFTAIGAPATFKFFDKNIDRKRYTSTTEILNATLIHQSITGLYETRIDLSKLGGD

SEQ ID NO: 684 - protein, 1345 aa, Streptococcus mutans
MKKPYSIGLDIGTNSVGWAVVTDDYKVPAKKMKVLGNTDKSHIKKNLLGALLFDSGNTAADRRLKRTARRRYTRRRNRILYLQEIFAEEMSKVDDSFFHRLEDSFLVTEDKRGERHPIFGNLEEEVKYHENFPTIYHLRQYLADNPEKVDLRLVYLALAHIIKFRGHFLIEGKFDTRNNDVQRLFQEFLAVYDNTFENSSLQEQNVQVEEILTDKISKSAKKDRVLKLFPNEKSNGRFAEFLKLIVGNQADFKKHFELEEKAPLQFSKDTYEEELEVLLAQIGDNYAELFLSAKKLYDSILLSGILTVTDVSTKAPLSASMIQRYNEHQMDLAQLKQFIRQKLSDKYNEVFSDVSKDGYAGYIDGKTNQEAFYKYLKGLLNKIEGSGYFLDKIEREDFLRKQRTFDNGSIPHQIHLQEMRAIIRRQAEFYPFLADNQDRIEKILTFRIPYYVGPLARGKSDFAWLSRKSADKITPWNFDEIVDKESSAEAFINRMTNYDLYLPNQKVLPKHSLLYEKFTVYNELTKVKYKTEQGKTAFFDANMKQEIFDGVFKVYRKVTKDKLMDFLEKEFDEFRIVDLTGLDKENKAFNASYGTYHDLRKILDKDFLDNSKNEKILEDIVLTLTLFEDREMIRKRLENYSDLLTKEQVKKLERRHYTGWGRLSAELIHGIRNKESRKTILDYLIDDGNSNRNFMQLINDDALSFKEEIAKAQVIGETDNLNQVVSDIAGSPAIKKGILQSLKIVDELVKIMGHQPENIVVEMARENQFTNQGRRNSQQRLKGLTDSIKEFGSQILKEHPVENSQLQNDRLFLYYLQNGRDMYTGEELDIDYLSQYDIDHIIPQAFIKDNSIDNRVLTSSKENRGKSDDVPSKNVVRKMKSYWSKLLSAKLITQRKFDNLTKAERGGLTDDDKAGFIKRQLVETRQITKHVARILDERFHTETDENNKKIRQVKIVTLKSNLVSNFRKEFELYKVREINDYHHAHDAYLNAVIGKALLGVYPQLEPEFVYGDYPHFHGHKENKATAKKFFYSNIMNFFKKDDVRTDKNGEIIWKKDEHISNIKKVLSYPQVNIVKKVEEQTGGFSKESILPKGNSDKLIPRKTKKFYWDTKKYGGFDSPIVAYSILVIADIEKGKSKKLKTVKALVGVTIMEKMTFERDPVAFLERKGYRNVQEENIIKLPKYSLFKLENGRKRLLASARELQKGNEIVLPNHLGTLLYHAKNIHKVDEPKHLDYVDKHKDEFKELLDVVSNFSKKYTLAEGNLEKIKELYAQNNGEDLKELSSSFINLLTFTAIGAPAAFKFFDKNIDRKRYTSTTEILNATLIHQSITGLYETRIDLSKLGGD

SEQ ID NO: 685 - protein, 1345 aa, Streptococcus mutans; identical to SEQ ID NO: 681

SEQ ID NO: 686 - protein, 1345 aa, Streptococcus mutans; identical to SEQ ID NO: 682

SEQ ID NO: 687 - protein, 1345 aa, Streptococcus mutans; identical to SEQ ID NO: 683

SEQ ID NO: 688 - protein, 1345 aa, Streptococcus mutans; identical to SEQ ID NO: 684

SEQ ID NO: 689 - protein, 1345 aa, Streptococcus mutans; identical to SEQ ID NO: 682

SEQ ID NO: 690 - protein, 1345 aa, Streptococcus mutans; identical to SEQ ID NO: 682

SEQ ID NO: 691 - protein, 1345 aa, Streptococcus mutans; identical to SEQ ID NO: 682

SEQ ID NO: 692 - protein, 1345 aa, Streptococcus mutans; identical to SEQ ID NO: 682

SEQ ID NO: 693 - protein, 1359 aa, Streptococcus mutans
MKKPYSIGLDIGTNSVGWAVVTDDYKVPAKKMKVLGNTDKSHIKKNLLGALLFDSGNTAEDRRLKRTARRRYTRRRNRILYLQEIFAEEMMQVDESFFQRLDDSFLVEEDKRGSRYPIFGTLKEEKKYHKEFKTIYHLREKLANSTEKADLRLVYLSLAHMIKFRGHFLIEGQLKAENTNVQALFKDFVEVYDKTVEESHLSEMTVDALSILTEKVSKSRRLENLVECYPTEKKNTLFGNLIALSLGLQPNFKTNFQLSEDAKLQFSKDTYEEDLEGLLGEIGDEYADLFASAKNLYDAILLSGILAVDDNTTKAPLSASMVKRYKEHKEELAAFKRFIKEKLPKKYEEIFKDDTKNGYAGYVGADKKLRKRSGKLATEEEFYKYVKGILNKVEGADVWLDKIDREDFLRKQRTFDNGSIPHQIHLQEMHAILRRQGEHYPFLKENQDKIEKILTFRIPYYVGPLVRKGSRFAWAEYKADEKITPWNFDDILDKEKSAEKFITRMTLNDLYLPEEKVLPKHSLLYETFTVYNELTKVKYVNEQGEAKFFDANMKQEIFDHVFKENRKVTKDKLLNYLNKEFEEFRIVNLTGLDKENKVFNSSLGTYHDLRKILNKSFLDNKENEQIIEDIIQTLTLFEDREMIRQRLQKYSDIFTKAQLKKLERRHYTGWGRLSYKLINGIRDKQSNKTILGYLIDDGYSNRNFMQLINDDALSFKEEIAKAQVIGEMDGLNQVVSDIAGSPAIKKGILQSLKIVDELVKVMGHNPANIVIEMARENQTTAKGRRSSQKRYKRLEEAIKNLDHDLNHKILKEHPTDNQALQNDRLFLYYLQNGRDMYTEDPLDINRLSDYDIDHIIPQAFIKDNSIDNRVLTRSDKNRGKSDDVPSEEVVHKMKPFWSKLLSAKLITQRKFDNLTKAERGGLTDDDKAGFIKRQLVETRQITKHVARILDERFNTETDENNKKIRQVKIVTLKSNLVSNFRKEFELYKVREINDYHHAHDAYLNAVIGKALLGVYPQLEPEFVYGDYPHFHGHKENKATAKKFFYSNIMNFFKKGDVRTDKNGEIIWKKDEHISNIKKVLSYPQVNIVKKVEEQTGGFSKESILPKGNSDKLIPRKTKKFYWDTKKYGGFDSPIVAYSILVIADIEKGKSKKLKTVKALVGVTIMEKMTFERDPVAFLERKGYRNVQEENIIKLPKYSLFKLENGRKRLLASARELQKGNEIVLPNHLETLLYHAKNIHKVDEPKHLDYVDKHKDEFKELLDVVSNFSKKYTLAEGNLEKIKELYAQNNGEDLKELASSFINLLTFTAIGAPAAFKFFDKNIDRKRYTSTTEILNATLIHQSITGLYETRIDLNKLGGD

SEQ ID NO: 694 - protein, 1359 aa, Streptococcus mutans; identical to SEQ ID NO: 693

SEQ ID NO: 695 - protein, 1355 aa, Streptococcus mutans
MKKPYSIGLDIGTNSVGWAVVTDDYKVPAKKMKVLGNTDKSHIKKNLLGALLFDSGNTAEDRRLKRTARRRYTRRRNRILYLQEIFAEEMSKVDDSFFHRLDESFLTDDDKNFDSHPIFGNKAEEDAYHQKFPTIYHLRKHLADSTEKADLRLVYLALAHMIKFRGHFLIEGELNAENTDVQKLFADFVGVYDRTFDDSHLSEITVDASSILTEKISKSRRLEKLINNYPKEKKNTLFGNLIALSLGLQPNFKTNFKLSEDAKLQFSKDTYEEDLEELLGKIGDDYADLFTLAKNLYDAILLSGILTADDSSTKAPLSASMIKRYAEHHEDLEKLKEFIKANKPELYHDIFKDETKNGYAGYIENGVKQDEFYKYLKNTLSKITGSDYFLDQIEREDFLRKQRTFDNGSIPHQIHLQEMHAILRRQGDYYPFLKENQDRIEKILTFRIPYYVGPLARKNSRFAWAEYHSDEAVTPWNFDQVIDKESSAQAFIEHMTNNDLYLPNEKVLPKHSPLYEKYTVYNELTKIKYVTEIGEAKFFDANLKQEIFDGLFKHERKVTKKKLRTFLDKNFDEFRIVDIQGLDKETETFNASYATYQDLLKVIKDKVFMDNPENAEILENIVLTLTLFEDREMIKQRLAKYADVFDKKVIDQLARRHYTGWGRLSAKLLNGIRDKQSCKTIMDYLIDDAQSNRNLMQLITDDNLTFKDDIVKAQYVDNSDDLHQVVQSLAGSPAIKKGILQSLKIVDELVKVMGKEPEQIVVEMARENQTTAKGRRNSQQRYKRLKEAIKSLDRDLNHKILKEHPTDNQALQNNRLFLYYLQNGRDMYTGESLDINRLSDYDIDHVIPQAFIKDNSIDNRVLTSSKANRGKSDDVPSEDVVNRMRPFWNKLLSSGLISQRKYNNLTKKELTLDDKAGFIKRQLVETRQITKHVARMLDERFNKEFDDNNKRIRRVKIVTLKSNLVSSFRKEFELYKVREINDYHHAHDAYLNAVVVKALLVKYPKLEPEFVYGEYPKYNSYRERKTATQKMFFYSNIMNMFKSKVKLADDQIVERPMIEVNDETGEIAWDKTKHITTVKKVLSYPQVNIVKKVEEQTIGQNGGLFDDNPKSPLEVIPSKLVPLKKALNPEKYGGYQKPTTAYPILLIVDTKQLIPISVMDKKRFEQNPVKFLKDKGYQQIEKNNFVKLPKYTLVDIGNGIKRLWASSKEVHKGNQLVVSKKSQDLLYHAHHLDNDYSNEYVKNHYQQFDILFNEITSFSKKCKLGKEHIQKIEEAYSKERDFASIEELADGFIKLLGFTQLGATSPFSFLGIKLNQKQYTGKKDYLLPCMEATLIHQSITGLYETRIDLSKLGGD

SEQ ID NO: 696 - protein, 1355 aa, Streptococcus mutans; identical to SEQ ID NO: 695

SEQ ID NO: 697 - protein, 1345 aa, Streptococcus mutans
MKKPYSIGLDIGTNSVGWAVVTDDYKVPAKKMKVLGNTDKSHIKKNLLGALLFDSGNTAEDRRLKRTARRRYTRRRNRILYLQEIFSEEMDKVDDSFFHRLEDSFLVTEDKRGERHPIFGNLEEEVKYHENFPTIYHLRQYLADNPEKVDLRLVYLALAHIIKFRGHFLIEGKFDTRNNDVQRLFQEFLAVYDNTFENSSLQEQNVQVEEILTDKISKSAKKDRVLKLFPNEKSNGRFAEFLKLIVGNQADFKKHFELEEKAPLQFSKDTYEEELEVLLAQIGDNYAELFLSAKKLYDSILLSGILTVTDVSTKAPLSASMIQRYNEHQMDLAQLKQFIRQKLSDKYNEVFSDVSKDGYAGYIDGKTNQEAFYKYLKGLLNKIEGSGYFLDKIEREDFLRKQRTFDNGSIPHQIHLQEMRAIIRRQAEFYPFLADNQDRIEKILTFRIPYYVGPLARGKSDFAWLSRKSADKITPWNFDEIVDKESSAEAFINRMTNYDLYLPNQKVLPKHSLLYEKFTVYNELTKVKYKTEQGKTAFFDANMKQEIFDGVFKVYRKVTKDKLMDFLEKEFDEFRIVDLTGLDKENKVFNASYGTYHDLCKILDKDFLDNSKNEKILEDIVLTLTLFEDREMIRKRLENYSDLLTKEQVKKLERRHYTGWGRLSAELIHGIRNKESRKTILDYLIDDGNSNRNFMQLINDDALSFKEEIAKAQVIGETDNLNQVVSDIAGSPAIKKGILQSLKIVDELVKIMGHQPENIVVEMARENQFTKQGRRNSQQRLKGLTDSIKEFGSQILKEHPVENSQLQNDRLFLYYLQNGRDMYTGEELDIDYLSQYDIDHIIPQAFIKDNSIDNRVLTSSKENRGKSDDVPSKDVVRKMKSYWSKLLSAKLITQRKFDNLTKAERGGLTDDDKAGFIKRQLVETRQITKHVARILDERFYTETDENNKKIRQVKIVTLKSNLVSNFRKEFELYKVREINDYHHAHDAYLNAVIGKALLGVYPQLEPEFVYGDYPHFHGHKENKATAKKFFYSNIMNFFKKDDVRTDKNGEIIWKKDEHISNIKKVLSYPQVNIVKKVEEQTGGFSKESILPKGNSDKLIPRKTKKFYWDTKKYGGFDSPIVAYSILVIADIEKGKSKKLKTVKALVGVTIMEKMTFERDPVAFLERKGYRNVQEENIIKLPKYSLFKLENGRKRLLASARELQKGNEIVLPNHLGTLLYHAKNIHKVDEPKHLDYVDKHKDEFKELLDVVSNFSKKYTLAEGNLEKIKELYAQNNGEDLKELASSFINLLTFTAIGAPATFKFFDKNIDRKRYTSTTEILNATLIHQSITGLYETRIDLSKLGGD

SEQ ID NO: 698 - protein, 1345 aa, Streptococcus mutans; identical to SEQ ID NO: 697

SEQ ID NO: 699 - protein, 1345 aa, Streptococcus mutans
MKKPYSIGLDIGTNSVGWAVVTDDYKVPAKKMKVLGNTDKSHIKKNLLGALLFDSGNTAEDRRLKRTARRRYTRRRNRILYLQEIFSEEMGKVDDSFFHRLDESFLTDDDKNFDSHPIFGNKAEEDAYHQKFPTIYHLRKHLADSTEKADLRLVYLALAHMIKFRGHFLIEGELNAENTDVQKLFADFVGVYDRTFDDSHLSEITVDASSILTEKISKSRRLEKLINNYPKEKKNTLFGNLIALSLGLQPNFKTNFKLSEDAKLQFSKDTYEEELEVLLAQIGDNYAELFLSAKKLYDSILLSGILTVTDVSTKAPLSASMIQRYNEHQMDLAQLKQFIRQKLSDKYNEVFSDVSKDGYAGYIDGKTNQEAFYKYLKGLLNKIEGSGYFLDKIEREDFLRKQRTFDNGSIPHQIHLQEMRAIIRRQAEFYPFLADNQDRIEKILTFRIPYYVGPLARGKSDFAWLSRKSADKITPWNFDEIVDKESSVEAFINRMTNYDLYLPNQKVLPKHSLLYEKFTVYNELTKVKYKTEQGKTAFFDANMKQEIFDGVFKVYRKVTKDKLMDFLEKEFDEFRIVDLTGLDKENKAFNASYGTYHDLRKILDKDFLDNSKNEKILEDIVLTLTLFEDREMIRKRLKNYSDLLTKEQLKKLERRHYTGWGRLSAELIHGIRNKESRKTILDYLIDDGNSNRNFMQLINDDALSFKEEIAKAQVIGETDNLNQVVSDIAGSPAIKKGILQSLKIVDELVKIMGHQPENIVVEMARENQFTNQGRRNSQQRLKGLTDSIKEFGSQILKEHPVENSQLQNDRLFLYYLQNGRDMYTGEELDIDYLSQYDIDHIIPQAFIKDNSIDNRVLTSSKENRGKSDDVPSKDVVRKMKSYWSKLLSAKLITQRKFDNLTKGERGGLTDDDKAGFIKRQLVETRQITKHVARILDERFNTETDENNKKIRQVKIVTLKSNLVSNFRKEFELYKVREINDYHHAHDAYLNAVIGKALLGVYPQLEPEFVYGDYPHFHGHKENKATAKKFFYSNIMNFFKKDDVRTDKNGEIIWKKDEYISNIKKVLSYPQVNIVKKVEEQTGGFSKESILPKGDSDKLIPRKTKKFYWDTKKYGGFDSPIVAYSILVIADIEKGKSKKLKTVKALVGVTIMEKMTFERDPVAFLERKGYRNVQEENIIKLPKYSLFKLENGRKRLLASARELQKGNEIVLPNHLGTLLYHAKNIHKVDEPKHLDYVDKHKDEFKELLDVVSNFSKKYTLAEGNLEKIKELYAQNNGEDLKELASSFINLLTFTAIGAPATFKFFDKNIDRKRYTSTTEILNATLIHQSITGLYETRIDLSKLGGD

SEQ ID NO: 700 - protein, 1345 aa, Streptococcus mutans
MKKPYSIGLDIGTNSVGWAVVTDDYKVPAKKMKVLGNTDKSHIKKNLLGALLFDSGNTAEDRRLKRTARRRYTRRRNRILYLQEIFSEEMGKVDDSFFHRLDESFLTDDDKNFDSYPIFGNKAEEDAYHQKFPTIYHLRKHLADSTEKADLRLVYLALAHMIKFRGHFLIEGELNAENTDVQKLFADFVGVYDRTFDDSHLSEITVDASSILTEKISKSRRLEKLINNYPKEKKNTLFRNLVALSLGLQPNFKTNFKLSEDAKLQFSKDTYEEDLEELLGKIGDDYADLFTLAKNLYDAILLSGILTADDSSTKAPLSASMIKRYAEHHEDLEKLKEFIKANKPELYHDIFKDETKNGYAGYIENGVKQDEFYKYLKNTLSKIAGSDYFLDKIEREDFLRKQRTFDNGSIPHQIHLQEMHAILRRQGDYYPFLKENQDRIEKILTFRIPYYVGPLARGKSDFAWLSRKSADKITPWNFDEIVDKESSVEAFINRMTNYDLYLPNQKVLPKHSLLYEKFTVYNELTKVKYKTEQGKTAFFDANMKQEIFDGVFKVYRKVTKDKLMDFLEKEFDEFRIVDLTGLDKENKAFNASYGTYHDLRKILDKDFLDNSKNEKILEDIVLTLTLFEDREMIRKRLKNYSDLLTKEQLKKLERRHYTGWGRLSAELIHGIRNKESRKTILDYLIDDGNSNRNFMQLINDDALSFKEEIAKAQVIGETDNLNQVVSDIAGSPAIKKGILQSLKIVDELVKIMGHQPENIVVEMARENQFTNQGRRNSQQRLKGLTDSIKEFGSQILKEHPVENSQLQNDRLFLYYLQNGRDMYTGEELDIDYLSQYDIDHIIPQAFIKDNSIDNRVLTSSKENRGKSDDVPSKDVVRKMKSYWSKLLSAKLITQRKFDNLTKGERGGLTDDDKAGFIKRQLVETRQITKHVARILDERFNTETDENNKKIRQVKIVTLKSNLVSNFRKEFELYKVREINDYHHAHDAYLNAVIGKALLGVYPQLEPEFVYGDYPHFHGHKENKATAKKFFYSNIMNFFKKDDVRTDKNGEIIWKKDEYISNIKKVLSYPQVNIVKKVEEQTGGFSKESILPKGDSDKLIPRKTKKFYWDTKKYGGFDSPIVAYSILVIADIEKGKSKKLKTVKALVGVTIMEKMTFERDPVAFLERKGYRNVQEENIIKLPKYSLFKLENGRKRLLASARELQKGNEIVLPNHLGTLLYHAKNIHKVDEPKHLDYVDKHKDEFKELLDVVSNFSKKYTLAEGNLEKIKELYAQNNGEDLKELASSFINLLTFTAIGAPATFKFFDKNIDRKRYTSTTEILNATLIHQSITGLYETRIDLSKLGGD

SEQ ID NO: 701 - protein, 1345 aa, Streptococcus mutans; identical to SEQ ID NO: 700

SEQ ID NO: 702 - protein, 1345 aa, Streptococcus mutans
MKKPYSIGLDIGTNSVGWAVVTDDYKVPAKKMKVLGNTDKSHIKKNLLGALLFDSGNTAEDRRLKRTARRRYTRRRNRILYLQEIFSEEMGKVDDSFFHRLEDSFLVTEDKRGERHPIFGNLEEEVKYHENFPTIYHLRQYLADNPEKTDLRLVYLALAHIIKFGGHFLIEGKFDTRNNDVQRLFQEFLAVYDNTFENSSLQEQNVQVEEILTDKISKSAKKDRVLKLFPNEKSNGRFAEFLKLIVGNQADFKKHFELEEKAPLQFSKDIYEEELEVLLAQIGDNYAELFLSAKKLYDSILLSGILTVTDVSTKAPLSASMIQRYNEHQMDLAQLKQFIRQKLSDKYNEVFSDVSKDGYAGYIDGKTNQEAFYKYLKGLLNKIEGSGYFLDKIEREDFLRKQRTFDNGSIPHQIHLQEMRAIIRRQAEFYPFLADNQDRIEKILTFRIPYYVGPLARGKSDFAWLSRKSADKITPWNFDEIVDKESSVEAFINRMTNYDLYLPNQKVLPKHSLLYEKFTVYNELTKVKYKTEQGKTAFFDANMKQEIFDGVFKVYRKVTKDKLMDFLEKEFDEFRIVDLTGLDKENKAFNASYGTYHDLRKILDKDFLDNSKNEKILEDIVLTLTLFEDREMIRKRLKNYSDLLTKEQLKKLERRHYTGWGRLSAELIHGIRNKESRKTILDYLIDDGNSNRNFMQLINDDALSFKEEIAKAQVIGETDNLNQVVSDIAGSPAIKKGILQSLKIVDELVKIMGHQPENIVVEMARENQFTNQGRRNSQQRLKGLTDSIKEFGSQILKEHPVENSQLQNDRLFLYYLQNGRDMYTGEELDIDYLSQYDIDHIIPQAFIKDNSIDNRVLTSSKENRGKSDDVPSKNVVRKMKSYWSKLLSAKLITQRKFDNLTKAERGGLTDDDKAGFIKRQLVETRQITKHVARILDERFHTETDENNKKIRQVKIVTLKSNLVSNFRKEFELYKVREINDYHHAHDAYLNAVIGKALLGVYPQLEPEFVYGDYPHFHGHKENKATAKKFFYSNIMNFFKKDDVRTDKNGEIIWKKDEHISNIKKVLSYPQVNIVKKVEEQTGGFSKESILPKGNSDKLIPRKTKKFYWDTKKYGGFDSPIVAYSILVIADIEKGKSKKLKTVKALVGVTIMEKMTFERDPVAFLERKGYRNVQEENIIKLPKYSLFKLENGRKRLLASARELQKGNEIVLPNHLGTLLYHAKNIHKVDEPKHLDYVDKHKDEFKELLDVVSNFSKKYTLAEGNLEKIKELYAQNNGEDLKELASSFINLLTFTAIGAPATFKFFDKNIDRKRYTSTTEILNATLIHQSITGLYETRIDLSKLGGD

SEQ ID NO: 703 - protein, 1345 aa, Streptococcus mutans; identical to SEQ ID NO: 702

SEQ ID NO: 704 - protein, 1345 aa, Streptococcus mutans
MKKPYSIGLDIGTNSVGWAVVTDDYKVPAKKMKVLGNTDKSHIKKNLLGALLFDSGNTAEDRRLKRTARRRYTRRRNRILYLQEIFSEEMGKVDDSFFHRLEDSFLVTEDKRGERHPIFGNLEEEVKYHENFPTIYHLRQYLADNPEKTDLRLVYLALAHIIKFRGHFLIEGKFDTRNNDVQRLFQEFLAVYDNTFENSSLQEQNVQVEEILTDKISKSAKKDRVLKLFPNEKSNGRFAEFLKLIVGNQADFKKHFELEEKAPLQFSKDIYEEELEVLLAQIGDNYAELFLSAKKLYDSILLSGILTVTDVSTKAPLSASMIQRYNEHQMDLAQLKQFIRQKLSDKYNEVFSDVSKDGYAGYIDGKTNQEAFYKYLKGLLNKIEGSGYFLDKIEREDFLRKQRTFDNGSIPHQIHLQEMRAIIRRQAEFYPFLADNQDRIEKILTFRIPYYVGPLARGKSDFAWLSRKSADKITPWNFDEIVDKESSVEAFINRMTNYDLYLPNQKVLPKHSLLYEKFTVYNELTKVKYKTEQGKTAFFDANMKQEIFDGVFKVYRKVTKDKLMDFLEKEFDEFRIVDLTGLDKENKAFNASYGTYHDLRKILDKDFLDNSKNEKILEDIVLTLTLFEDREMIRKRLKNYSDLLTKEQLKKLERRHYTGWGRLSAELIHGIRNKESRKTILDYLIDDGNSNRNFMQLINDDALSFKEEIAKAQVIGETDNLNQVVSDIAGSPAIKKGILQSLKIVDELVKIMGHQPENIVVEMARENQFTNQGRRNSQQRLKGLTDSIKEFGSQILKEHPVENSQLQNDRLFLYYLQNGRDMYTGEELDIDYLSQYDIDHIIPQAFIKDNSIDNRVLTSSKENRGKSDDVPSKNVVRKMKSYWSKLLSAKLITQRKFDNLTKAERGGLTDDDKAGFIKRQLVETRQITKHVARILDERFHTETDENNKKIRQVKIVTLKSNLVSNFRKEFELYKVREINDYHHAHDAYLNAVIGKALLGVYPQLEPEFVYGDYPHFHGHKENKATAKKFFYSNIMNFFKKDDVRTDKNGEIIWKKDEHISNIKKVLSYPQVNIVKKVEEQTGGFSKESILPKGNSDKLIPRKTKKFYWDTKKYGGFDSPIVAYSILVIADIEKGKSKKLKTVKALVGVTIMEKMTFERDPVAFLERKGYRNVQEENIIKLPKYSLFKLENGRKRLLASARELQKGNEIVLPNHLGTLLYHAKNIHKVDEPKHLDYVDKHKDEFKELLDVVSNFSKKYTLAEGNLEKIKELYAQNNGEDLKELASSFINLLTFTAIGAPATFKFFDKNIDRKRYTSTTEILNATLIHQSITGLYETRIDLSKLGGD

SEQ ID NO: 705 - protein, 1345 aa, Streptococcus mutans
MKKPYSIGLDIGTNSVGWAVVTDDYKVPAKKMKVLGNTDKSHIKKNLLGALLFDSGNTAEDRRLKRTARRRYTRRRNRILYLQEIFSEEMGKVDDSFFHRLEDSFLVTEDKRGERHPIFGNLEEEVKYHENFPTIYHLRQYLADNPEKTDLRLVYLALAHIIKFRGHFLIEGKFDTRNNDVQRLFQEFLAVYDNTFENSSLQEQNVQVEEILTDKISKSAKKDRVLKLFPNEKSNGRFAEFLKLIVGNQADFKKHFELEEKAPLQFSKDIYEEELEVLLAQIGDNYAELFLSAKKLYDSILLSGILTVTDVSTKAPLSASMIQRYNEHQMDLAQLKQFIRQKLSDKYNEVFSDVSKDGYAGYIDGKTNQEAFYKYLKGLLNKIEGSGYFLDKIEREDFLRKQRTFDNGSIPHQIHLQEMRAIIRRQAEFYPFLADNQDRIEKILTFRIPYYVGPLARGKSDFAWLSRKSADKITPWNFDEIVDKESSVEAFINRMTNYDLYLPNQKVLPKHSLLYEKFTVYNELTKVKYKTEQGKTAFFDANMKQEIFDGVFKVYRKVTKDKLMDFLEKEFDEFRIVDLTGLDKENKAFNASYGTYHDLRKILDKDFLDNSKNEKILEDIVLTLTLFEDREMIRKRLKNYSDLLTKEQLKKLERRHYTGWGRLSAELIHGIRNKESRKTILDYLIDDGNSNRNFMQLINDDALSFKEEIAKAQVIGETDNLNQVVSDIAGSPAIKKGILQSLKIVDELVKIMGHQPENIVVEMARENQFTNQGRRNSQQRLKGLTDSIKEFGSQILKEHPVENSQLQNDRLFLYYLQNGRDMYTGEELDIDYLSQYDIDHIIPQAFIKDNSIDNRVLTSSKENRGKSDDVPSKDVVRKMKSYWSKLLSAKLITQRKFDNLTKAERGGLTDDDKAGFIKRQLVETRQITKHVARILDERFNTETDENNKKIRQVKIVTLKSNLVSNFRKEFELYKVREINDYHHAHDAYLNAVIGKALLGVYPQLEPEFVYGDYPHFHGHKENKATAKKFFYSNIMNFFKKDDVRTDKNGEIIWKKDEHISNIKKVLSYPQVNIVKKVEEQTGGFSKESILPKGNSYKLIPRKTKKFYWDTKKYGGFDSPIVAYSILVIADIEKGKSKKLKTVKALVGVTIMEKMTFERDPVAFLERKGYRNVQEENIIKLPKYSLFKLENGRKRLLASARELQKGNEIVLPNHLGTLLYHAKNIHKVDEPKHLDYVDKHKDEFKELLDVVSNFSKKYTLAEGNLEKIKELYAQNNGEDLKELASSFINLLTFTAIGAPAAFKFFDKNIDRKRYTSTTEILNATLIHQSITGLYETRIDLSKLGGD

SEQ ID NO: 706 - protein, 1345 aa, Streptococcus mutans
MKKPYSIGLDIGTNSVGWAVVTDDYKVPAKKMKVLGNTDKSHIKKNLLGALLFDSGNTAEDRRLKRTARRRYTRRRNRILYLQEIFSEEMGKVDDSFFHRLEDSFLVTEDKRGERHPIFGNLEEEVKYHENFPTIYHLRQYLADNPEKTDLRLVYLALAHIIKFRGHFLIEGKFDTRNNDVQRLFQEFLAVYDNTFENSSLQEQNVQVEEILTDKISKSAKKDRVLKLFPNEKSNGRFAEFLKLIVGNQADFKKHFELEEKAPLQFSKDIYEEELEVLLAQIGDNYAELFLSAKKLYDSILLSGILTVTDVSTKAPLSASMIQRYNEHQMDLAQLKQFIRQKLSDKYNEVFSDVSKDGYAGYIDGKTNQEAFYKYLKGLLNKIEGSGYFLDKIEREDFLRKQRTFDNGSIPHQIHLQEMRAIIRRQAEFYPFLADNQDRIEKILTFRIPYYVGPLARGKSDFAWLSRKSADKITPWNFDEIVDKESSAEAFINRMTNYDLYLPNQKVLPKHSLLYEKFTVYNELTKVKYKTEQGKTAFFDANMKQEIFDGVFKVYRKVTKDKLMDFLEKEFDEFRIVDLTGLDKENKAFNASYGTYHDLRKILDKDFLDNSKNEKILEDIVLTLTLFEDREMIRKRLKNYSDLLTKEQLKKLERRHYTGWGRLSAELIHGIRNKESRKTILDYLIDDGNSNRNFMQLINDDALSFKEEIAKAQVIGETDNLNQVVSDIAGSLAIKKGILQSLKIVDELVKIMGHQPENIVVEMARENQFTNQGRRNSQQRLKGLTDSIKEFGSQILKEHPVENSQLQNDRLFLYYLQNGRDMYTGEELDIDYLSQYDIDHIIPQAFIKDNSIDNRVLTSSKENRGKSDDVPSKDVVRKMKSYWSKLLSAKLITQRKFDNLTKGERGGLTDDDKAGFIKRQLVETRQITKHVARILDERFNTETDENNKKIRQVKIVTLKSNLVSNFRKEFELYKVREINDYHHAHDAYLNAVIGKALLGVYPQLEPEFVYGDYPHFHGHKENKATAKKFFYSNIMNFFKKDDVRTDKNGEIIWKKDEYISNIKKVLSYPQVNIVKKVEEQTGGFFKESILPKGDSDKLIPRKTKKFYWDTKKYGGFDSPIVAYSILVIADIEKGKSKKLKTVKALVGVTIMEKMTFERDPVAFLERKGYRNVQEENIIKLPKYSLFKLENGRKRLLASARELQKGNEIVLPNHLGTLLYHAKNIHKVDEPKHLDYVDKHKDEFKELLDVVSNFSKKYTLAEGNLEKIKELYAQNNGEDLKELASSFINLLTFTAIGAPATFKFFDKNIDRKRYTSTTEILNATLIHQSITGLYETRIDLSKLGGD

SEQ ID NO: 707 - protein, 1345 aa, Streptococcus mutans
MKKPYSIGLDIGTNSVGWAVVTDDYKVPAKKMKVLGNTDKSHIKKNLLGALLFDSGNTAEDRRLKRTARRRYTRRRNRILYLQEIFSEEMGKVDDSFFHRLEDSFLVTEDKRGERHPIFGNLEEEVKYHENFPTIYHLRQYLADNPEKTDLRLVYLALAHIIKFRGHFLIEGKFDTRNNDVQRLFQEFLAVYDNTFENSSLQEQNVQVEEILTDKISKSAKKDRVLKLFPNEKSNGRFAEFLKLIVGNQADFKKHFELEEKAPLQFSKDIYEEELEVLLAQIGDNYAELFLSAKKLYDSILLSGILTVTDVSTKAPLSASMIQRYNEHQMDLAQLKQFIRQKLSDKYNEVFSDVSKDGYAGYIDGKTNQEAFYKYLKGLLNKIEGSGYFLDKIEREDFLRKQRTFDNGSIPHQIHLQEMRAIIRRQAEFYPFLADNQDRIEKILTFRIPYYVGPLARGKSDFAWLSRKSADKITPWNFDEIVDKESSVEAFINRMTNYDLYLPNQKVLPKHSLLYEKFTVYNELTKVKYKTEQGKTAFFDANMKQEIFDGVFKVYRKVTKDKLMDFLEKEFDEFRIVDLTGLDKENKAFNASYGTYHDLRKILDKDFLDNSKNEKILEDIVLTLTLFEDREMIRKRLKNYSDLLTKEQLKKLERRHYTGWGRLSAELIHGIRNKESRKTILDYLIDDGNSNRNFMQLINDDALSFKEEIAKAQVIGETDNLNQVVSDIAGSPAIKKGILQSLKIVDELVKIMGHQPENIVVEMARENQFTNQGRRNSQQRLKGLTDSIKEFGSQILKEHPVENSQLQNDRLFLYYLQNGRDMYTGEELDIDYLSQYDIDHIIPQAFIKDNSIDNRVLTSSKENRGKSDDVPSKDVVRKMKSYWSKLLSAKLITQRKFDNLTKAERGGLTDDDKAGFIKRQLVETRQITKHVARILDERFNTETDENNKKIRQVKIVTLKSNLVSNFRKEFELYKVREINDYHHAHDAYLNAVIGKALLGVYPQLEPEFVYGDYPHFHGHKENKATAKKFFYSNIMNFFKKDDVRTDKNGEIIWKKDEHISNIKKVLSYPQVNIVKKVEEQTGGFSKESILPKGNSDKLIPRKTKKFYWDTKKYGGFDSPIVAYSILVIADIEKGKSKKLKTVKALVGVTIMEKMTFERDPVAFLERKGYRNVQEENIIKLPKYSLFKLENGRKRLLASARELQKGNEIVLPNHLGTLLYHAKNIHKVDEPKHLDYVDKHKDEFKELLDVVSNFSKKYTLAEGNLEKIKELYAQNNGEDLKELASSFINLLTFTAIGAPATFKFFDKNIDRKRYTSTTEILNATLIHQSITGLYETRIDLNKLGGD

SEQ ID NO: 708 - protein, 1345 aa, Streptococcus mutans; identical to SEQ ID NO: 707

SEQ ID NO: 709 - protein, 1345 aa, Streptococcus mutans; identical to SEQ ID NO: 704

SEQ ID NO: 710 - protein, 1345 aa, Streptococcus mutans; identical to SEQ ID NO: 705

SEQ ID NO: 711 - protein, 1345 aa, Streptococcus mutans; identical to SEQ ID NO: 706

SEQ ID NO: 712 - protein, 1345 aa, Streptococcus mutans
MKKPYSIGLDIGTNSVGWAVVTDDYKVPAKKMKVLGNTDKSHIKKNLLGALLFDSGNTAEDRRLKRTARRRYTRRRNRILYLQEIFSEEMGKVDDSFFHRLEDSFLVTEDKRGERHPIFGNLEEEVKYHENFPTIYHLRQYLADNPEKVDLRLVYLALAHIIKFRGHFLIEGKFDTRNNDVQKLFQEFLAVYDNTFENSSLQEQNVQVEEILTDKISKSAKKDRVLKLFPNEKSNGRFAEFLKLIVGNQADFKKHFELEEKAPLQLSKDTYEEELEVLLAQIGDNYAELFLSAKKLYDSILLSGILTVTDVSTKAPLSASMIQRYNEHQMDLAQLKQFIRQKLSDKYNEVFSDVSKDGYAGYIDGKTNQEAFYKYLKGLLNKIEGSGYFLDKIEREDFLRKQRTFDNGSIPHQIHLQEMRAIIRRQAEFYPFLADNQDRIEKILTFRIPYYVGPLARGKSDFAWLSRKSADKITPWNFDEIVDKESSVEAFINRMTNYDLYLPNQKVLPKHSLLYEKFTVYNELTKVKYKTEQGKTAFFDANMKQEIFDGVFKVYRKVTKDKLMDFLEKEFDEFRIVDLTGLDKENKAFNASYGTYHDLRKILDKDFLDNSKNEKILEDIVLTLTLFEDREMIRKRLENYSDLLTKEQVKKLERRHYTGWGRLSAELIHGIRNKESRKTLLDYLIDDGNSNRNFMQLINDDALSFKEEIAKAQVIGETDNLNQVVSDIAGSPAIKKGILQSLKIVDELVKIMGHQPENIVVEMARENQFTNQGRRNSQQRLKGLTDSIKEFGSQILKEHPVENSQLQNDRLFLYYLQNGRDMYTGEELDIDYLSQYDIDHIIPQAFIKDNSIDNRVLTSSKENRGKSDDVPSKDVVRKMKSYWSKLLSAKLITQRKFDNLTKAERGGLTDDDKAGFIKRQLVETRQITKHVARILDERFNTETDENNKKIRQVKIVTLKSNLVSNFRKEFELYKVREINDYHHAHDAYLNAVIGKALLGVYPQLEPEFVYGDYPHFHGHKENKATAKKFFYSNIMNFFKKDDVRTDKNGEIIWKKDEYISNIKKVLSYPQVNIVKKVEEQTGGFSKESILPKGNSDKLIPRKTKKFYWDTKKYGGFDSPIVAYSILVIADIEKGKSKKLKTVKALVGVTIMEKMTFERDPIAFLERKGYRNVQEENIIKLPKYSLFKLENGRKRLLASARELQKGNEIVLPNHLGTLLYHAKNIHKVDEPKHLDYVDKHKDEFKELLDVVSNFSKKYTLAEGNLEKIKELYAQNNGEDLKELASSFINLLTFTAIGAPATFKFFDKNIDRKRYTSTTEILNATLIHQSITGLYETRIDLSKLGGD

SEQ ID NO: 713 - protein, 1345 aa, Streptococcus mutans; identical to SEQ ID NO: 712

SEQ ID NO: 714 - protein, 1345 aa, Streptococcus mutans
MKKPYSIGLDIGTNSVGWAVVTDDYKVPAKKMKVLGNTDKSHIKKNLLGALLFDSGNTAEDRRLKRTARRRYTRRRNRILYLQEIFSEEMGKVDDSFFHRLEDSFLVTEDKRGERHPIFGNLEEEVKYHENFPTIYHLRQYLADNPEKVDLRLVYLALAHIIKFRGHFLIEGKFDTRNNDVQRLFQEFLAVYDNTFENSSLQEQNVQVEEILTDKISKSAKKDRVLKLFPNEKSNGRFAEFLKLIVGNQADFKKHFELEEKAPLQFSKDTYEEDLEELLGKIGDDYADLFTLAKNLYDAILLSGILTADDSSTKAPLSASMIQRYNEHQMDLAQLKQFIRQKLSDKYNEVFSDVSKDGYAGYIDGKTNQEAFYKYLKGLLNKIEGSGYFLDKIEREDFLRKQRTFDNGSIPHQIHLQEMRAIIRRQAEFYPFLADNQDRIEKILTFRIPYYVGPLARGKSDFAWLSRKSADKITPWNFDEIVDKESSAEAFINRMTNYDLYLPNQKVLPKHSLLYEKFTVYNELTKVKYKTEQGKTAFFDANMKQEIFDGVFKVYRKVTKDKLMDFLEKEFDEFRIVDLTGLDKENKVFNASYGTYHDLCKILDKDFLDNSKNEKILEDIVLTLTLFEDREMIRKRLENYSDLLTKEQVKKLERRHYTGWGRLSAELIHGIRNKESRKTILDYLIDDGNSNRNFMQLINDDALSFKEEIAKAQVIGETDNLNQVVSDIAGSPAIKKGILQSLKIVDELVKIMGHQPENIVVEMARENQFTNQGRRNSQQRLKGLTDSIKEFGSQILKEHPVENSQLQNDRLFLYYLQNGRDMYTGEELDIDYLSQYDIDHIIPQAFIKDNSIDNRVLTSSKENRGKSDDVPSKDVVRKMKSYWSKLLSAKLITQRKFDNLTKAERGGLTDDDKAGFIKRQLVETRQITKHVARILDERFYTETDENNKKIRQVKIVTLKSNLVSNFRKEFELYKVREINDYHHAHDAYLNAVIGKALLGVYPQLEPEFVYGDYPHFHGHKENKATAKKFFYSNIMNFFKKDDVRTDKNGEIIWKKDEHISNIKKVLSYPQVNIVKKVEEQTGGFSKESILPKGNSDKLIPRKTKKFYWDTKKYGGFDSPIVAYSILVIADIEKGKSKKLKTVKALVGVTIMEKMTFERDPVAFLERKGYRNVQEENIIKLPKYSLFKLENGRKRLLASARELQKGNEIVLPNHLGTLLYHAKNIHKVDEPKHLDYVDKHKDEFKELLDVVSNFSKKYTLAEGNLEKIKELYAQNNGEDLKELASSFINLLTFTAIGAPATFKFFDKNIDRKRYTSTTEILNATLIHQSITGLYETRIDLSKLGGD

SEQ ID NO: 715 - protein, 1345 aa, Streptococcus mutans
MKKPYSIGLDIGTNSVGWAVVTDDYKVPAKKMKVLGNTDKSHIKKNLLGALLFDSGNTAEDRRLKRTARRRYTRRRNRILYLQEIFSEEMGKVDDSFFHRLEDSFLVTEDKRGERHPIFGNLEEEVKYHENFPTIYHLRQYLADNPEKVDLRLVYLALAHIIKFRGHFLIEGKFDTRNNDVQRLFQEFLAVYDNTFENSSLQEQNVQVEEILTDKISKSAKKDRVLKLFPNEKSNGRFAEFLKLIVGNQADFKKHFELEEKAPLQFSKDTYEEDLEELLGKIGDDYADLFTLAKNLYDAILLSGILTADDSSTKAPLSASMIQRYNEHQMDLAQLKQFIRQKLSDKYNEVFSDVSKDGYAGYIDGKTNQEAFYKYLKGLLNKIEGSGYFLDKIEREDFLRKQRTFDNGSIPHQIHLQEMRAIIRRQAEFYPFLADNQDRIEKILTFRIPYYVGPLARGKSDFAWLSRKSADKITPWNFDEIVDKESSAEAFINRMTNYDLYLPNQKVLPKHSLLYEKFTVYNELTKVKYKTEQGKTAFFDANMKQEIFDGVFKVYRKVTKDKLMDFLEKEFDEFRIVDLTGLDKENKVFNASYGTYHDLCKILDKDFLDNSKNEKILEDIVLTLTLFEDREMIRKRLENYSDLLTKEQVKKLERRHYTGWGRLSAELIHGIRNKESRKTILDYLIDDGNSNRNFMQLINDDALSFKEEIAKAQVIGETDNLNQVVSDIAGSPAIKKGILQSLKIVDELVKIMGHQPENIVVEMARENQFTNQGRRNSQQRLKGLTDSIKEFGSQILKEHPVENSQLQNDRLFLYYLQNGRDMYTGEELDIDYLSQYDIDHIIPQAFIKDNSIDNRVLTSSKENRGKSDDVPSKDVVRKMKPYWSKLLSAKLITQRKFDNLTKAERGGLTDDDKAGFIKRQLVETRQITKHVARILDERFNTETDENNKKIRQVKIVTLKSNLVSNFRKEFELYKVREINDYHHAHDAYLNAVIGKALLGVYPQLEPEFVYGDYPHFHGHEENKATAKKFFYSNIMNFFKKDDVRTDKNGEIIWKKDEHISNIKKVLSYPQVNIVKKVEEQTGGFSKESILPKGNSDKLIPRKTKKFYWDTKKYGGFDSPIVAYSILVIADIEKGKSKKLKTVKALVGVTIMEKMTFERDPVAFLERKGYRNVQEENIIKLPKYSLFKLENGRKRLLASARELQKGNEIVLPNHLGTLLYHAKNIHKVDEPKHLDYVDKHKDEFKELLDVVSNFSKKYTLAEGNLEKIKELYAQNNGEDLKELASSFINLLTFTAIGAPATFKFFDKNIDRKRYTSTTEILNATLIHQSITGLYETRIDLSKLGGD

SEQ ID NO: 716 - protein, 1345 aa, Streptococcus mutans
MKKPYSIGLDIGTNSVGWAVVTDDYKVPAKKMKVLGNTDKSHIKKNLLGALLFDSGNTAEDRRLKRTARRRYTRRRNRILYLQEIFSEEMGKVDDSFFHRLEDSFLVTEDKRGERHPIFGNLEEEVKYHENFPTIYHLRQYLADNPEKVDLRLVYLALAHIIKFRGHFLIEGKFDTRNNDVQRLFQEFLAVYDNTFENSSLQEQNVQVEEILTDKISKSAKKDRVLKLFPNEKSNGRFAEFLKLIVGNQADFKKHFELEEKAPLQFSKDTYEEELEVLLAQIGDNYAELFLSAKKLYDSILLSGILTVTDVSTKAPLSASMIQRYNEHQMDLAQLKQFIRQKLSDKYNEVFSDVSKDGYAGYIDGKTNQEAFYKYLKGLLNKIEGSGYFLDKIEREDFLRKQRTFDNGSIPHQIHLQEMRAIIRRQAEFYPFLADNQDRIEKILTFRIPYYVGPLARGKSDFAWLSRKSADKITPWNFDEIVDKESSAEAFINRMTNYDLYLPNQKVLPKHSLLYEKFTVYNELTKVKYKTEQGKTAFFDANMKQEIFDGVFKVYRKVTKDKLMDFLEKEFDEFRIVDLTGLDKENKVFNASYGTYHDLCKILDKDFLDNSKNEKILEDIVLTLTLFEDREMIRKRLENYSDLLTKEQVKKLERRHYTGWGRLSAELIHGIRNKESRKTILDYLIDDGNSNRNFMQLINDDALSFKEEIAKAQVIGETDNLNQVVSDIAGSPAIKKGILQSLKIVDELVKIMGHQPENIVVEMARENQFTKQGRRNSQQRLKGLTDSIKEFGSQILKEHPVENSQLQNDRLFLYYLQNGRDMYTGEELDIDYLSQYDIDHIIPQAFIKDNSIDNRVLTSSKENRGKSDDVPSKDVVRKMKSYWSKLLSAKLITQRKFDNLTKAERGGLTDDDKAGFIKRQLVETRQITKHVARILDERFYTETDENNKKIRQVKIVTLKSNLVSNFRKEFELYKVREINDYHHAHDAYLNAVIGKALLGVYPQLEPEFVYGDYPHFHGHKENKATAKKFFYSNIMNFFKKDDVRTDKNGEIIWKKDEHISNIKKVLSYPQVNIVKKVEEQTGGFSKESILPKGNSDKLIPRKTKKFYWDTKKYGGFDSPIVAYSILVIADIEKGKSKKLKTVKALVGVTIMEKMTFERDPVAFLERKGYRNVQEENIIKLPKYSLFKLENGRKRLLASARELQKGNEIVLPNHLGTLLYHAKNIHKVDEPKHLDYVDKHKDEFKELLDVVSNFSKKYTLAEGNLEKIKELYAQNNGEDLKELASSFINLLTFTAIGAPATFKFFDKNIDRKRYTSTTEILNATLIHQSITGLYETRIDLSKLGGD

SEQ ID NO: 717 - protein, 1345 aa, Streptococcus mutans
MKKPYSIGLDIGTNSVGWAVVTDDYKVPAKKMKVLGNTDKSHIKKNLLGALLFDSGNTAEDRRLKRTARRRYTRRRNRILYLQEIFSEEMGKVDDSFFHRLEDSFLVTEDKRGERHPIFGNLEEEVKYHENFPTIYHLRQYLADNPEKVDLRLVYLALAHIIKFRGHFLIEGKFDTRNNDVQRLFQEFLAVYDNTFENSSLQEQNVQVEEILTDKISKSAKKDRVLKLFPNEKSNGRFAEFLKLIVGNQADFKKHFELEEKAPLQFSKDTYEEELEVLLAQIGDNYAELFLSAKKLYDSILLSGILTVTDVSTKAPLSASMIQRYNEHQMDLAQLKQFIRQKLSDKYNEVFSDVSKDGYAGYIDGKTNQEAFYKYLKGLLNKIEGSGYFLDKIEREDFLRKQRTFDNGSIPHQIHLQEMRAIIRRQAEFYPFLADNQDRIEKILTFRIPYYVGPLARGKSDFAWLSRKSADKITPWNFDEIVDKESSAEAFINRMTNYDLYLPNQKVLPKHSLLYEKFTVYNELTKVKYKTEQGKTAFFDANMKQEIFDGVFKVYRKVTKDKLMDFLEKEFDEFRIVDLTGLDKENKVFNASYGTYHDLCKILDKDFLDNSKNEKILEDIVLTLTLFEDREMIRKRLENYSDLLTKEQVKKLERRHYTGWGRLSAELIHGIRNKESRKTILDYLIDDGNSNRNFMQLINDDALSFKEEIAKAQVIGETDNLNQVVSDIAGSPAIKKGILQSLKIVDELVKIMGHQPENIVVEMARENQFTKQGRRNSQQRLKGLTDSIKEFGSQILKEHPVENSQLQNDRLFLYYLQNGRDMYTGEELDIDYLSQYDIDHIIPQAFIKDNSIDNRVLTSSKENRGKSDDVPSKDVVRKMKSYWSKLLSAKLITQRKFDNLTKAERGGLTDDDKAGFIKRQLVETRQITKHVARILDERFYTETDENNKKIRQVKIVTLKSNLVSNFRKEFELYKVREINDYHHAHDAYLNAVIGKALLGVYPQLEPEFVYGDYPHFHGHKENKATAKKFFYSNIMNFFKKDDVRTDRNGEIIWKKDEHISNIKKVLSYPQVNIVKKVEEQTGGFSKESILPKGNSDKLIPRKTKKFYWDTKKYGGFDSPIVAYSILVIADIEKGKSKKLKTVKALVGVTIMEKMTFERDPVAFLERKGYRNVQEENIIKLPKYSLFKLENGRKRLLASARELQKGNEIVLPNHLGTLLYHAKNIHKVDEPKHLDYVDKHKDEFKELLDVVSNFSKKYTLAEGNLEKIKELYAQNNGEDLKELASSFINLLTFTAIGAPATFKFFDKNIDRKRYTSTTEILNATLIHQSITGLYETRIDLSKLGGD

SEQ ID NO: 718 - protein, 1345 aa, Streptococcus mutans
MKKPYSIGLDIGTNSVGWAVVTDDYKVPAKKMKVLGNTDKSHIKKNLLGALLFDSGNTAEDRRLKRTARRRYTRRRNRILYLQEIFSEEMGKVDDSFFHRLEDSFLVTEDKRGERHPIFGNLEEEVKYHENFPTIYHLRQYLADNPEKVDLRLVYLALAHIIKFRGHFLIEGKFDTRNNDVQRLFQEFLAVYDNTFENSSLQEQNVQVEEILTDKISKSAKKDRVLKLFPNEKSNGRFAEFLKLIVGNQADFKKHFELEEKAPLQFSKDTYEEELEVLLAQIGDNYAELFLSAKKLYDSILLSGILTVTDVSTKAPLSASMIQRYNEHQMDLAQLKQFIRQKLSDKYNEVFSDVSKDGYAGYIDGKTNQEAFYKYLKGLLNKIEGSGYFLDKIEREDFLRKQRTFDNGSIPHQIHLQEMRAIIRRQAEFYPFLADNQDRIEKILTFRIPYYVGPLARGKSDFAWLSRKSADKITPWNFDEIVDKESSAEAFINRMTNYDLYLPNQKVLPKHSLLYEKFTVYNELTKVKYKTEQGKTAFFDANMKQEIFDGVFKVYRKVTKDKLMDFLEKEFDEFRIVDLTGLDKENKVFNASYGTYHDLCKILDKDFLDNSKNEKILEDIVLTLTLFEDREMIRKRLENYSDLLTKEQVKKLERRHYTGWGRLSAELIHGIRNKESRKTILDYLIDDGNSNRNFMQLINDDALSFKEEIAKAQVIGETDNLNQVVSDIAGSPAIKKGILQSLKIVDELVKIMGHQPENIVVEMARENQFTNQGRQNSQQRLKGLTDSIKEFGSQILKEHPVENSQLQNDRLFLYYLQNGRDMYTGEELDIDYLSQYDIDHIIPQAFIKDNSIDNRVLTSSKENRGKSDDVPSEDVVRKMKSYWSKLLSAKLITQRKFDNLTKAERGGLTDDDKAGFIKRQLVETRQITKHVARILDERFYTETDENNKKIRQVKIVTLKSNLVSNFRKEFELYKVREINDYHHAHDAYLNAVIGKALLGVYPQLEPEFVYGDYPHFHGHKENKATAKKFFYSNIMNFFKKDDVRTDKNGEIIWKKDEHISNIKKVLSYPQVNIVKKVEEQTGGFSKESILPKGNSDKLIPRKTKKFYWDTKKYGGFDSPIVAYSILVIADIEKGKSKKLKTVKALVGVTIMEKMTFERDPVAFLERKGYRNVQEENIIKLPKYSLFKLENGRKRLLASARELQKGNEIVLPNHLGTLLYHAKNIHKVDEPKHLDYVDKHKDEFKELLDVVSNFSKKYTLAEGNLEKIKELYAQNNGEDLKELASSFINLLTFTAIGAPATFKFFDKNIDRKRYTSTTEILNATLIHQSITGLYETRIDLSKLGGD

SEQ ID NO: 719 - protein, 1345 aa, Streptococcus mutans; identical to SEQ ID NO: 718

SEQ ID NO: 720 - protein, 1345 aa, Streptococcus mutans; identical to SEQ ID NO: 714

SEQ ID NO: 721 - protein, 1345 aa, Streptococcus mutans; identical to SEQ ID NO: 715

SEQ ID NO: 722 - protein, 1345 aa, Streptococcus mutans; identical to SEQ ID NO: 716

SEQ ID NO: 723 - protein, 1345 aa, Streptococcus mutans; identical to SEQ ID NO: 717

SEQ ID NO: 724 - protein, 1345 aa, Streptococcus mutans; identical to SEQ ID NO: 716

SEQ ID NO: 725 - protein, 1345 aa, Streptococcus mutans; identical to SEQ ID NO: 716

SEQ ID NO: 726 - protein, 1345 aa, Streptococcus mutans; identical to SEQ ID NO: 716

SEQ ID NO: 727 - protein, 1345 aa, Streptococcus mutans; identical to SEQ ID NO: 717

SEQ ID NO: 728 - protein, 1345 aa, Streptococcus mutans
MKKPYSIGLDIGTNSVGWAVVTDDYKVPAKKMKVLGNTDKSHIKKNLLGALLFDSGNTAEDRRLKRTARRRYTRRRNRILYLQEIFSEEMGKVNDSFFHRLEDSFLVTEDKRGERHPIFGNLEEEVKYHENFPTIYHLRQYLADNPEKVDLRLVYLALAHIIKFRGHFLIEGKFDTRNNDVQRLFQEFLAVYDNTFENSSLQEQNVQVEEILTDKISKSAKKDRVLKLFPNEKSNGRFAEFLKLIVGNQADFKKHFELEEKAPLQFSKDTYEEELEVLLAQIGDNYAELFLSAKKLYDSILLSGILTVTDVSTKAPLSASMIQRYNEHQMDLAQLKQFIRQKLSDKYNEVFSDVSKDGYAGYIDGKTNQEAFYKYLKGLLNKIEGSGYFLDKIEREDFLRKQRTFDNGSIPHQIHLQEMRAIIRRQAEFYPFLADNQDRIEKILTFRIPYYVGPLARGKSDFAWLSRKSADKITPWNFDEIVDKESSAEAFINRMTNYDLYLPNQKVLPKHSLLYEKFTVYNELTKVKYKTEQGKTAFFDANMKQEIFDGVFKVYRKVTKDKLMDFLEKEFDEFRIVDLTGLDKENKVFNASYGTYHDLCKILDKDFLDNSKNEKILEDIVLTLTLFEDREMIRKRLENYSDLLTKEQVKKLERRHYTGWGRLSAELIHGIRNKESRKTILDYLIDDGNSNRNFMQLINDDALSFKEEIAKAQVIGETDNLNQVVSDIAGSPAIKKGILQSLKIVDELVKIMGHQPENIVVEMARENQFTKQGRRNSQQRLKGLTDSIKEFGSQILKEHPVENSQLQNDRLFLYYLQNGRDMYTGEELDIDYLSQYDIDHIIPQAFIKDNSIDNRVLTSSKENRGKSDDVPSKDVVRKMKSYWSKLLSAKLITQRKFDNLTKAERGGLTDDDKAGFIKRQLVETRQITKHVARILDERFYTETDENNKKIRQVKIVTLKSNLVSNFRKEFELYKVREINDYHHAHDAYLNAVIGKALLGVYPQLEPEFVYGDYPHFHGHKENKATAKKFFYSNIMNFFKKDDVRTDKNGEIIWKKDEYISNIKKVLSYPQVNIVKKVEEQTGGFSKESILPKGNSDKLIPRKTKKFYWDTKKYGGFDSPIVAYSILVIADIEKGKSKKLKTVKALVGVTIMEKMTFERDPIAFLERKGYRNVQEENIIKLPKYSLFKLENGRKRLLASARELQKGNEIVLPNHLGTLLYHAKNIHKVDEPKHLDYVDKHKDEFKELLDVVSNFSKKYTLAEGNLEKIKELYAQNNGEDLKELASSFINLLTFTAIGAPAAFKFFDKNIDRKRYTSTTEILNATLIHQSITGLYETRIDLSKLGGD

SEQ ID NO: 729 - protein, 1345 aa, Streptococcus mutans; identical to SEQ ID NO: 728

SEQ ID NO: 730 - protein, 1345 aa, Streptococcus mutans
MKKPYSIGLDIGTNSVGWAVVTDDYKVPAKKMKVLGNTDKSHIKKNLLGALLFDSGNTAEDRRLKRTTRRRYTRRRNRILYLQEIFSEEMGKVDDSFFHRLEDSFLVTEDKRGERHPIFGNLEEEVKYHENFPTIYHLRQYLADNPEKTDLRLVYLALAHIIKFRGHFLIEGKFDTRNNDVQRLFQEFLAVYDNTFENSSLQEQNVQVEEILTDKISKSAKKDRVLKLFPNEKSNGCFAEFLKLIVGNQADFKKHFELEEKAPLQFSKDTYEEELEVLLAQIGDNYAELFLSAKKLYDSILLSGILTVTDVSTKAPLSASMIQRYNEHQMDLTQLKQFIRQKLSDKYNEVFSDVSKDGYAGYIDGKTNQEAFYKYLKGLLNKIEGSGYFLDKIEREDFLRKQRTFDNGSIPHQIHLQEMRAIIRRQAEFYPFLADNQDRIEKLLTFRIPYYVGPLASGKSDFAWLSRKSADKITPWNFDEIVDKESSAEAFINRMTNYDLYLPNQKVLPKHSLLYEKFTVYNELTKVKYKTEQGKTAFFDANMKQEIFDGVFKVYRKVTKDKLMDFLEKEFDEFRIVDLTGLDKENKVFNASYGTYHDLCKILDKDFLDNSKNEKILEDIVLTLTLFEDREMIRKRLENYSDLLTKEQVKKLERRHYTGWGRLSAELIHGIRNKESRKTILDYLIDDGNSNRNFMQLINDDALSFKEEIAKAQVIGETDNLNQVVSDIAGSPAIKKGILQSLKIVDELVKIMGHQPENIVVEMARENQFTNQGRRNSQQRLKGLTDSIKEFGSQILKEHPVENSQLQNDRLFLYYLQNGRDMYTGEELDIDYLSQYDIDHIIPQAFIKDNSIDNRVLTSSKENRGKSDDVPSKDVVRKMKSYWSKLLSAKLITQRKFDNLTKAERGGLTDDDKAGFIKRQLVETRQITKHVARILDERFNTETDENNKKIRQVKIVTLKSNLVSNFRKEFELYKVREINDYHHAHDAYLNAVIGKALLGVYPQLEPEFVYGDYPHFHGHKENKATAKKFFYSNIMNFFKKDDVRTDKNGEIIWKKDEHISNIKKVLSYPQVNIVKKVEEQTGGFSKESILPKGNSDKLIPRKTKKFYWDTKKYGGFDSPIVAYSILVIADIEKGKSKKLKTVKALVGVTIMEKMTFERDPVAFLERKGYRNVQEENIIKLPKYSLFKLENGRKRLLASARELQKGNEIVLPNHLGTLLYHAKNIHKVDEPKHLDYVDKHKDEFKELLDVVSNFSKKYTLAEGNLEKIKELYAQNNGEDLKELASSFINLLTFTAIGAPATFKFFDKNIDRKRYTSTTEILNATLIHQSITGLYETRIDLSKLGGD

SEQ ID NO: 731 - protein, 1345 aa, Streptococcus mutans; identical to SEQ ID NO: 730

SEQ ID NO: 732 - protein, 1350 aa, Streptococcus mutans
MKKPYSIGLDIGTNSVGWAVVTDDYKVPAKKMTVLGNTDKSHIKKNLLGALLFDSGNTAADRRLKRTARRRYTRRRNRILYLQEIFAEEMSKVDDSFFHRLEDSFLVTEDKRGERHPIFGNLEEEVKYHENFPTIYHLRQYLADNPEKVDLRLVYLALAHIIKFRGHFLIEGKFDTRNNDVQRLFQEFLAVYDNTFENSSLQEQNVQVEEILTDKISKSAKKDRVLKLFPNEKSNGRFAEFLKLIVGNQADFKKHFELEEKTPLQFSKDTYEEELEVLLAQIGDNYAELFLSAKKLYDSILLSGILTVTDVSTKAPLSASMIQRYNEHQMDLAQLKQFIRQKLSDKYNEVFSDVSKDGYAGYIDGKTNQEAFYKYLKGLLNKIEGSGYFLDKIEREDFLRKQRTFDNGSIPHQIHLQEMRAIIRRQAEFYPFLADNQDRIEKILTFRIPYYVGPLARGKSDFAWLSRKSADKITPWNFDEIVDKESSAEAFINRMTNYDLYLPNQKVLPKHSLLYEKFTVYNELTKVKYKTEQGKTAFFDANMKQEIFDGVFKVYRKVTKDKLMDFLEKEFDEFRIVDLTGLDKENKAFNASYGTYHDLRKILDKDFLDNSKNEKILEDIVLTLTLFEDREMIRKRLENYSDLLTKEQVKKLERRHYTGWGRLSAELIHGIRNKESRKTILDYLIDDGNSNRNFMQLINDDALSFKEEIAKAQVIGETDNLNQVVSDIAGSPAIKKGILQSLKIVDELVKIMGHQPENIVVEMARENQFTNQGRRNSQQRLKGLTDSIKEFGSQILKEHPVENSQLQNDRLFLYYLQNGRDMYTGEELDIDYLSQYDIDHIIPQAFIKDNSIDNRVLTSSKENRGKSDDVPSEDVVNRMRPFWNKLLSSGLISQRKYNNLTKKELTPDDKAGFIKRQLVETRQITKHVARMLDERFNKEFDDNNKRIRRVKIVTLKSNLVSSFRKEFELYKVREINDYHHAHDAYLNAVVVKALLVKYPKLEPEFVYGEYPKYNSYRERKTATQKMFFYSNIMNMFKSKVKLADDQIVERPMIEVNDETGEIAWDKTKHITTVKKVLSYPQVNIVKKVEEQTIGQNGGLFDDNPKSPLEVIPSKLVPLKKALNPEKYGGYQKPTTAYPILLIVDTKQLIPISVMDKKRFEQNPVKFLKDKGYQQIEKNNFVKLPKYTLVDIGNGIKRLWASSKEVHKGNQLVVSKKSQDLLYHAHHLDNDYSNEYVKNHYQQFDILFNEITSFSKKCKLGKEHIQKIEEAYSKERDSASIEELADGFIKLLGFTQLGATSPFSFLGIKLNQKQYTGKKDYLLPCMEATLIHQSITGLYETRIDLSKLGGD

SEQ ID NO: 733 - protein, 1350 aa, Streptococcus mutans; identical to SEQ ID NO: 732

SEQ ID NO: 734 - protein, 1345 aa, Streptococcus mutans
MKKPYSIGLDIGTNSVGWAVVTDDYKVPDKKMKVLGNTDKSHIKKNLLGALLFDSGNTAEDRRLKRTARRRYTRRRNRILYLQEIFSEEMGKVDDSFFHRLEDSFLVTEDKRGERHPIFGNLEEEVKYHENFPTIYHLRQYLADNPEKTDLRLVYLALAHIIKFRGHFLIEGKFDTRNNDVQRLFQEFLAVYDNTFENSSLQEQNVQVEEILTDKISKSAKKDRVLKLFPNEKSNGRFAEFLKLIVGNQADFKKHFELEEKAPLQFSKDIYEEELEVLLAQIGDNYAELFLSAKKLYDSILLSGILTVTDVSTKAPLSASMIQRYNEHQMDLAQLKQFIRQKLSDKYNEVFSDVSKDGYAGYIDGKTNQEAFYKYLKGLLNKIEGSGYFLDKIEREDFLRKQRTFDNGSIPHQIHLQEMRAIIRRQAEFYPFLADNQDRIEKILTFRIPYYVGPLARGKSDFAWLSRKSADKITPWNFDEIVDKESSVEAFINRMTNYDLYLPNQKVLPKHSLLYEKFTVYNELTKVKYKTEQGKTAFFDANMKQEIFDGVFKVYRKVTKDKLMDFLEKEFDEFRIVDLTGLDKENKAFNASYGTYHDLRKILDKDFLDNSKNEKILEDIVLTLTLFEDREMIRKRLKNYSDLLTKEQLKKLERRHYTGWGRLSAELIHGIRNKESRKTILDYLIDDGNSNRNFMQLINDDALSFKEEIAKAQVIGETDNLNQVVSDIAGSPAIKKGILQSLKIVDELVKIMGHQPENIVVEMARENQFTNQGRRNSQQRLKGLTDSIKEFGSQILKEHPVENSQLQNDRLFLYYLQNGRDMYTGEELDIDYLSQYDIDHIIPQAFIKDNSIDNRVLTSSKENRGKSDDVPSKDVVRKMKSYWSKLLSAKLITQRKFDNLTKAERGGLTDDDKAGFIKRQLVETRQITKHVARILDERFYTETDENNKKIRQVKIVTLKSNLVSNFRKEFELYKVREINDYHHAHDAYLNAVIGKALLGVYPQLEPEFVYGDYPHFHGHKENKATAKKFFYSNIMNFFKKDDVRTDKNGEIIWKKDEHISNIKKVLSYPQVNIVKKVEEQTGGFSKESILPKGNSDKLIPRKTKKFYWDTKKYGGFDSPIVAYSILVIADIEKGKSKKLKTVKALVGVTIMEKMTFERDPVAFLERKGYRNVQEENIIKLPKYSLFKLENGRKRLLASARELQKGNEIVLPNHLGTLLYHAKNIHKVDEPKHLDYVDKHKDEFKELLDVVSNFSKKYTLAEGNLEKIKELYAQNNGEDLKELASSFINLLTFTAIGAPATFKFFDKNIDRKRYTSTTEILNATLIHQSITGLYETRIDLSKLGGD

SEQ ID NO: 735 - protein, 1345 aa, Streptococcus mutans
MKKPYSIGLDIGTNSVGWAVVTDDYKVSAKKMKVLGNTDKSHIKKNLLGALLFDSGNTAEDRRLKRTARRRYTRRRNRILYLQEIFAEEMSKVDDSFFHRLEDSFLVTEDKRGERHPIFGNLEEEVKYHENFPTIYHLRQYLADNPEKVDLRLVYLALAHIIKFRGHFLIEGKFDTRNNDVQRLFQEFLAVYDNTFENSSLQEQNVQVEEILTDKISKSAKKDRVLKLFPNEKSNGRFAEFLKLIVGNQADFKKHFELEEKAPLQFSKDTYEEELEVLLAQIGDNYAELFLSAKKLYDSILLSGILTVTDVSTKAPLSASMIQRYNEHQMDLAQLKQFIRQKLSDKYNEVFSDVSKDGYAGYIDGKTNQEAFYKYLKGLLNKIEGSGYFLDKIEREDFLRKQRTFDNGSIPHQIHLQEMRAIIRRQAEFYPFLADNQDRIEKILTFRIPYYVGPLARGKSDFAWLSRKSADKITPWNFDEIVDKESSAEAFINRMTNYDLYLPNQKVLPKHSLLYEKFTVYNELTKVKYKTEQGKTAFFDANMKQEIFDGVFKVYRKVTKDKLMDFLEKEFDEFRIVDLTGLDKENKAFNASYGTYHDLRKILDKDFLDNSKNEKILEDIVLTLTLFEDREMIRKRLENYSDLLTKEQVKKLERRHYTGWGRLSAELIHGIRNKESRKTILDYLIDDGNSNRNFMQLINDDALSFKEEIAKAQVIGETDNLNQVVSDIAGSPAIKKGILQSLKIVDELVKIMGHQPENIVVEMARENQFTNQGRRNSQQRLKGLTDSIKEFGSQILKEHPVEHSQLQNDRLFLYYLQNGRDMYTGEELDIDYLSQYDIDHIIPQAFIKDNSIDNRVLTSSKENRGKSDDVPSKNVVRKMKSYWSKLLSAKLITQRKFDNLTKAERGGLTDDDKAGFIKRQLVETRQITKHVARILDERFHTETDENNKKIRQVKIVTLKSNLVSNFRKEFELYKVREINDYHHTHDAYLNAVIGKALLGVYPQLEPEFVYGDYPHFHGHKENKATAKKFFYSNIMNFFKKDDVRTDKNGEIIWKKDEHISNIKKVLSYPQVNIVKKVEEQTGGFSKESILPKGNSDKLIPRKTKKFYWDTKKYGGFDSPIVAYSILVIADIEKGKSKKLKTVKALVGVTIMEKMTFERDPVAFLERKGYRNVQEENIIKLPKYSLFKLENGRKRLLASARELQKGNEIVLPNHLGTLLYHAKNIHKVDEPKHLDYVDKHKDEFKELLDVVSNFSKKYTLAEGNLEKIKELYAQNNGEDLKELASSFINLLTFTAIGAPATFKFFDKNIDRKRYTSTTEILNATLIHQSITGLYETRIDLSKLGGD

SEQ ID NO: 736 - protein, 1345 aa, Streptococcus mutans; identical to SEQ ID NO: 735

SEQ ID NO: 737 - protein, 1345 aa, Streptococcus mutans
MKKPYSIGLDIGTNSVGWSVVTDDYKVPAKKMKVLGNTDKSHIEKNLLGALLFDSGNTAEDRRLKRTARRRYTRRRNRILYLQEIFSEEMGKVDDSFFHRLEDSFLVTEDKRGERHPIFGNLEEEVKYHENFPTIYHLRQYLADNPEKVDLRLVYLALAHIIKFRGHFLIEGKFDTRNNDVQRLFQEFLAVYDNTFENSSLQEQNVQVEEILTDKISKSAKKDRVLKLFPNEKSNGRFAEFLKLIVGNQADFKKHFELEEKAPLQFSKDTYEEELEVLLAQIGDNYAELFLSAKKLYDSILLSGILTVTDVGTKAPLSASMIQRYNEHQMDLAQLKQFIRQKLSDKYNEVFSDVSKDGYAGYIDGKTNQEAFYKYLKGLLNKIEGSGYFLDKIEREDFLRKQRTFDNGSIPHQIHLQEMRAIIRRQAEFYPFLADNQDRIEKLLTFRIPYYVGPLARGKSDFAWLSRKSADKITPWNFDEIVDKESSAEAFINRMTNYDLYLPNQKVLPKHSLLYEKFTVYNELTKVKYKTEQGKTAFFDANMKQEIFDGVFKVYRKVTKDKLMDFLEKEFDEFRIVDLTGLDKENKVFNASYGTYHDLCKILDKDFLDNSKNEKILEDIVLTLTLFEDREMIRKRLENYSDLLTKEQVKKLERRHYTGWGRLSAELIHGIRNKESRKTILDYLIDDGNSNRNFMQLINDDALSFKEEIAKAQVIGETDNLNQVVSDIAGSPAIKKGILQSLKIVDELVKIMGHQPENIVVEMARENQFTNQGRRNSQQRLKGLTDSIKEFGSQILKEHPVENSQLQNDRLFLYYLQNGRDMYTGEELDIDYLSQYDIDHIIPQAFIKDNSIDNRVLTSSKENRGKSDDVPSKDVVRKMKSYWSKLLSAKLITQRKFDNLTKAERGGLTDDDKAGFIKRQLVETRQITKHVARILDERFNTETDENNKKIRQVKIVTLKSNLVSNFRKEFELYKVREINDYHHAHDAYLNAVIGKALLGVYPQLEPEFVYGDYPHFHGHKENKATAKKFFYSNIMNFFKKDDVRIDKNGEIIWKKDEHISNIKKVLSYPQVNIVKKVEEQTGGFSKESILPKGNSDKLIPRKTKKFYWDTKKYGGFDSPIVAYSILVIADIEKGKSKKLKTVKALVGVTIMEKMTFERDPVAFLERKGYRNVQEENIIKLPKYSLFKLENGRKRLLASARELQKGNEIVLPNHLGTLLYHAKNIHKVDEPKHLDYVDKHKDEFKELLDVVSNFSKKYTLAEGNLEKIKELYAQNNGEDLKELASSFINLLTFTAIGAPATFKFFDKNIDRKRYTSTTEILNATLIHQSITGLYETRIDLSKLGGD

SEQ ID NO: 738 - protein, 1345 aa, Streptococcus mutans; identical to SEQ ID NO: 737

SEQ ID NO: 739 - protein, 1355 aa, Streptococcus mutans
MKKSYSIGLDIGTNSVGWAVVTDDYKVPAKKMKVLGNTDKSHIKKNLLGALLFDSGNTAEDRRLKRTARRRYTRRRNRILYLQEIFSEEMGKVDDSFFHRLDESFLTDDDKNFDSHPIFGNKAEEDAYHQKFPTIYHLRKHLADSTEKADLRLVYLALAHMIKFRGHFLIEGELNAENTDVQKLFADFVGVYDRTFDDSHLSEITVDASSILTEKISKSRRLEKLINNYPKEKKNTLFGNLIALSLGLQPNFKTNFKLSEDAKLQFSKDTYEEDLEELLGKIGDDYADLFTLAKNLYDAILLSGILTADDSSTKAPLSASMIKRYAEHHEDLEKLKEFIKANKPELYHDIFKDETKNGYAGYIENGVKQDEFYKYLKNTLSKIAGSDYFLDKIEREDFLRKQRTFDNGSIPHQIHLQEMHAILRRQGDYYPFLKENQDRIEKILTFRIPYYVGPLARKNSRFAWAEYHSDEAVMPWNFDQVIDKESSAQAFIEHMTNNDLYLPNEKVLPKHSPLYEKYTVYNELTKIKYVTEIGEAKFFDANLKQEIFDGLFKHERKVTKKKLRTFLDKNFDEFRIVDIQGLDKETETFNASYATYQDLLKVIKDKVFMDNPENAEILENIVLTLTLFEDREMIKQRLAKYADVFDKKVIDQLARRHYTGWGRLSAKLLNGIRDKQSCKTIMDYLIDDAQSNRNLMQLITDDNLTFKDDIVKAQYVDNSDDLHQVVQSLAGSPAIKKGILQSLKIVDELVKVMGKEPEQIVVEMARENQTTAKGRRNSQQRYKRLKEAIKSLDRDLNHKILKEHPTDNQALQNNRLFLYYLQNGRDMYTGESLDINRLSDYDIDHVIPQAFIKDNSIDNRVLTSSKANRGKSDDVPSEDVVNRMRPFWNKLLSSGLISQRKYNNLTKKELTPDDKAGFIKRQLVETRQITKHVARMLDERFNKEFDDNNKRIRRVKIVTLKSNLVSSFRKEFELYKVREINDYHHAHDAYLNAVVVKALLVKYPKLEPEFVYGEYPKYNSYRERKTATQKMFFYSNIMNMFKSKVKLADDQIVERPMIEVNDETGEIAWDKTKHITTVKKVLSYPQVNIVKKVEEQTIGQNGGLFDDNPKSPLEVIPSKLVPLKKALNPEKYGGYQKPTTAYPILLIVDTKQLIPISVMDKKRFEQNPVKFLKDKGYQQIEKNNFVKLPKYTLVDIGNGIKRLWASSKEVHKGNQLVVSKKSQDLLYHAHHLDNDYSNEYVKNHYQQFDILFNEITSFSKKCKLGKEHIQKIEEAYSKERDSASIEELADGFIKLLGFTQLGATSPFSFLGIKLNQKQYTGKKDYLLPCMEATLIHQSITGLYETRIDLNKLGGD

SEQ ID NO: 740 - protein, 1355 aa, Streptococcus mutans; identical to SEQ ID NO: 739

SEQ ID NO: 741 - protein, 1125 aa, Streptococcus mutans
MTNGKILGLDIGIASVGVGIINAKTGNVEHASSRIFPAANADNNVERRSARGGRRLIRRKKHRLKRVEDLFEKYNIDTDFSNLNLNPYQLRVKGLNEQLSNEELFAILKNIAKRRGISYLDDAEDDSVGSSDYAKAIDENRKLLKKQTPGEIQLKRLEKYGQLRGNFTIQDENGEYHRLINVFSTSDYVKEARRILETQSYYNKFITESFVEDYIKILQGKRKYYVGPGNEKSRTDYGIYRTDGETLDNLFGILIGKCGFYPEEYRAAKASYTAQEYNFLNDLNNLTVPTETKKLSTEQKYQLVDFAKTASTLEAAKLLKEIAKLVGCQVEEIKGYRLDNKDKPDLHTFEPFRKLKSNLTTIAVENLSITTLDTLAHILTLNTEREGIEEAIQKELPNIFSDEQITGIIAVRKKNSQIFGKGWHSFSIKLMKELIPELYETSEEQMTILIRLKKVKTNSKITNRTKYINEQEVTDEIYNPVVSKSIRQTVKIINAAIKKYGAFDQIVIEMPRESNEEDERKFIADLQKSNAKEKDDAMKQAALLYNGKAELPHGVFHGHKELATKIRLWYQQGERCLYSGKHIDIHDLIHNQHMFEIDHVLPLSLSFDDSLANKVLVYSWANQEKGQRTPFQALPQMASAWSFRELRDYISKQKGISKKKRDYLLTEQDINKVEVKQKFIERNLVDTRYVSRVVLNTLQDALKVMNKETKISVIRGQFTSQLRRQWRIDKSRETYHHHAVDALIIAASSQLRLWKKQNNPMFAEDKHGQKINLDTGEVLSDDAYKELVYQAPYQGFVNTISSKSFEDEILFSYQVDSKVNRKISDATIYATRQAQLGKDKKEETYVLGKIKDIYSQAGYDAFRKKYDKDKAVFLMYQKDPETWEKVIEVILRDYKELDDKGKEIGNPFERYKVKHGFVRKYSRKNKGTEIKSLKYYDNKLGNHIDITPNNSKHSVVLQSINPWRADLYFNPETTKYELMGLKYADLSFEKGTGKYSISREKYDEIKEREGISSKSEFKFTLYKNDLILVKDIGNHKELIARFNSKNDTSKHYVELKPWNKAKFDSEEELIPAFGKVAKSGQFIKGLNKPDLSIYKVKTDILGHKYYIKKEGDKPKLNFENKIKNK

SEQ ID NO: 742 - protein, 1125 aa, Streptococcus mutans
MTNGKILGLDIGIASVGVGIINAKTGNVEHASSRIFPAANADNNVERRSARGGRRLIRRKKHRLKRVEDLFEKYNIDTDFSNLNLNPYQLRVKGLNEQLSNEELFAILKNIAKRRGISYLDDAEDDSVGSSDYAKAIDENRKLLKKQTPGEIQLKRLEKYGQLRGNFTIQDENGEYHRLINVFSTSDYVKEARRILETQSYYNKFITESFVEDYIKILQGKRKYYVGPGNEKSRTDYGIYRTDGETLDNLFGILIGKCGFYPEEYRAAKASYTAQEYNFLNDLNNLTVPTETKKLSTEQKYQLVDFAKTASTLGAAKLLKEIAKLVGCQVEEIKGYRLDNKDKPDLHTFEPFRKLKSNLTTIAVENLSITTLDTLAHILTLNTEREGIEEAIQKELPNIFSDEQITEIIAVRKKNSQIFGKGWHSFSIKLMKELIPELYETSEEQMTILTRLKKVKTNSKITNRTKYINEEEITDEIYNPVVSKSIRQTVKIINATIKKYGAFDQIIIEMPRESNEEDERKFIADLQKSNAKEKDDAMKQAALLYNGKDELPHDVFHGHKELATKIRLWYQQGERCLYSGKHIDIHDLIHNQHMFEIDHVLPLSLSFDDSLANKVLVYSWANQEKGQRTPFQALPQMASAWSFRELRDYISKQKGISKKKRDYLLTEQDINKVEVKQKFIERNLVDTRYVSRVVLNTLQDALKVMNKETKISVIRGQFTSQLRRQWRIDKSRETYHHHAVDALIIAASSQLRLWKKQNNPMFAEDKHGQKINLDTGEVLSDDAYKELVYQAPYQGFVNTISSKSFEDEILFSYQVDSKVNRKISDATIYATRQAQLGKDKKEETYVLGKIKDIYSQAGYDAFRKKYDKDKAVFLMYQKDPETWEKVIEVILRDYKELDDKGKEIGNPFERYKVKHGFVRKYSRKNKGTEIKSLKYYDNKLGNHIDITPNNSKHSVVLQSINPWRADLYFNPETTKYELMGLKYADLSFEKGTGKYSISREKYDEIKEREGISSKSEFKFTLYKNDLILVKDIGNHKELIARFNSKNDTSKHYVELKPWNKAKFDSEEELIPAFGKVAKSGQFIKGLNKPDLSIYKVKTDILGHKYYIKKEGDKPKLNFENKIKNK

SEQ ID NO: 743 - protein, 1125 aa, Streptococcus mutans; identical to SEQ ID NO: 742

SEQ ID NO: 744 - protein, 1125 aa, Streptococcus mutans; identical to SEQ ID NO: 741

SEQ ID NO: 745 - protein, 670 aa, Streptococcus oralis
MAKFNKNYSIGLDIGVSSVGYAVVTEDYRVPAFKFKVLGNTEKEKIKKNLIGSTTFVPAQSAQGTRVFRVNRRRIDRRNHRIAYLRDIFQKEIGKIDKNFYRRLDESFRVLGDKSEDIQIKQPFFGNKELETAYHKKYPTIYHLRKHLADADKNSPVADIREVYMALSHIFKYRGHFLTLGKIDPNNINMQNSWIDFIESCQDAFDLEISDESKTIAAIFKSSDNRQEKVKGILSYFQPELAKKDKSIFKQLLQLLFGLKTKFKECFELEEEPDLNFSKENYDENLENLLGTLEEDFPDVFAKLKILRDTILLSDMLTYTGATHARFSATMVERYEEHRKDLQRFKSFVKQNLSEQDYLDIFGRKTPNGFDVDKETKGYVGYISNKMVLTNKQKTIQQNFYDYISGKITGIEGAEYFLNKISDGTFLRKLRTTDNGTIPNQIHAYELEKIIERQGRDYPFLLENKDKLLSILTFKIPYYVGPLAKGNNSRFAWIKRTTSQDVLDNNDEDTKNGKIRPWNYHKLINMDETRDAFITNLIGNDIILLNEKVLPKRSLIYEEVMLQNELTRIKYKDKYGKIHFFDSELRQEIINNLFKTNSKRVSSAMLLAYLENFTNLQAVEIVSGIEKGKSLNSTLKTYNDLKTIFSEDLLDSEIYQKELEEIIKVITVFV

SEQ ID NO: 746 - protein, 1373 aa, Streptococcus oralis
MENKNYSIGLDIGTNSVGWAVITDDYKVPSKKMKVLGNTDKRFIKKNLIGALLFDEGTTAEARRLKRTARRRYTRRKNRLRYLQEIFAEEMSKVDSSFFHRLDDSFLIPEDKKGSKYPIFATLIEEKEYHKQFPTIYHLRKQLADSKEKTDLRLIYLALAHMIKYRGHFLYEDTFDIKNNDIQKIFNEFISIYNNTFEGNSLSGQNVQVEAIFTDKISKSAKRERVLKLFPDEKSTGLFSEFLKLIVGNQADFKKHFDLEEKAPLQFSRDTYDEDLENLLGQIGDDFADLFVAAKKLYDAILLSGILTVTDPSTKAPLSASMIERYENHQKDLATLKQFIKTNLPEKYDEVFSDQSKDGYAGYIDGKTTQESFYKYIKNLLSKFEGADYFLEKIEREDFLRKQRTFDNGSIPHQIHLQEMNAILRRQGEHYPFLKENKEKIEKILTFRIPYYVGPLARGNRDFAWLTRNSDQAIRPWNFEEIVDKASSAESFINKMTNYDLYLPEEKVLPKHSLLYETFAVYNELTKVKFIAEGLRDYQFLDSRQKKDIFYTLFKAEDKRKVTEKDIIQYLHTVDGYDGIELKGIEKQFNASLSTYHDLLKIIKDKEFMDDPNNEEILENIVHTLTIFEDREMIKQRLAQYDSLFDEKVIKALTRRHYTGWGKLSSKLINGIRDKQTGKTILDYLMDDGYNNRNFMQLINDDELSFKEIIKKAQVVGKTDDVKQVVQELPGSPAIKKGILQSIKLVDELVKVMGHEPESIVIEMARENQTTARGKKNSQQRYKRIEDSLKILASGLNAKILKEHPTDNIQLQNDRLFLYYLQNGRDMYTGKPLDINQLSSYDIDHIVPQAFIKDDSLDNRVLTSLKDNRGKSDNVPSLEVVEKMKTFWQQLLDSKLISYRKFNNLTKAERGGLDERDKVGFIKRQLVETRQITKHVAQILDARYNTEVNEKDKKNRTVKIITLKSNLVSNFRKEFRLYKIREINDYHHAHDAYLNAVVAKAILKKYPKLEPEFVYGDYQKYDLKRYISRSKDPKEIEKATEKYFFYSNLLNFFKEEVHYADGTIVKRENIEYSKDTGEIAWNKEKDFATIKKVLSLPQVNIVKKREVQTGGFSKESILPKGNSDKLIPRKTKDILWDTTKYGGFDSPVIAYSILLIADIEKGKAKRLKTVKTLVGITIMEKATFEKSPIAFLENKGYHNVRKENILCLPKYSLFELKNGRRRMLASAKELQKGNEIVLPVHLTTLLYHAKNIHRLDEPEHLEYIQKHRNEFKGLLNLVSEFSQKYVLADANLEKIKNLYADNEQADIEILANSFINLLTFTALGAPAAFKFFGKDVDRKRYTTVSEILNATLIHQSITGLYETRIDLSKLGED

SEQ ID NO: 747 - protein, 1371 aa, Streptococcus oralis
MENKNYSIGLDIGTNSVGWSVITDDYKVPSKKMKVLGNTDKRFIKKNLIGALLFDEGTTAEARRLKRTARRRYTRRKNRLRYLQEIFAEEMSKVDSSFFHRLDDSFLIPEDKRGSKYPIFATLAEEKEYHKQFPTIYHLRKQLADSKEKTDLRLIYLALAHMIKYRGHFLYEDTFDIKNNDIQKIFSEFISIYDNTFEGSSLSGQNAQVEAIFTDKISKSAKRERVLKLFPDEKSTGLFSEFLKLIVGNQADFKKHFDLGEKAPLQFSKDTYDEDLENLLGQIGDDFADLFLVAKKLYDAILLSGILTVTDPSTKAPLSASMIERYENHQKDLAVLKQFIKNNLPEKYDEVFSDQSKDGYAGYIDGKTTQEAFYKYIKNLLSKFEGTDYFLEKIEREDFLRKQRTFDNGSIPHQIHLQEMNAILRRQGEHYPFLKDNKEKIEKILTFRIPYYVGPLARGNRDFAWLTRNSDEAIRPWNFEEIVDKASSAEDFINKMTNYDLYLPEEKVLPKHSLLYETFAVYNELTKVKFIAEGLRDYQFLDSGQKKQIVTQLFKEKRKVTEKDIIQFLHNVDGYDGIELKGIEKQFNASLSTYHDLLKIIKDKEFMDDSKNEEILENIVHTLTIFEDREMIKQRLAQYDSLFDEKVIKALIRRHYTGWGKLSAKLIDGICDKQTGNTILDYLIDDGKNNRNFMQLINDDGLSFKEITQKAQVVGKTDDVKQVVQELPGSPAIKKGILQSIKIVDELVKVMGHTPESIVIEMARENQTTARGKKNSQQRYKRIEDALKNLASGLDSNILKEHPTNNIQLQNDRLFLYYLQNGRDMYTGKPLDINQLSSYDIDHIVPQAFIKDDSLDNRVLTSLKDNRGKSDNVPSIEVVQKRKAFWQQLLDSKLISERKFNNLTKAERGGLDERDKVGFIKRQLVETRQITKHVAQILDARFNKEVNEKDKKNRTVKIITLKSNLVSNFRKEFRLYKVREINDYHHAHDAYLNAVVAKAILKKYPKLEPEFVYGDYQKYDLKRYISRSRNPKEVEKATEKYFFYSNLLNFFKEEVHYADGTIVKRENIEYSKDTGEIAWNKEKDFATIKKVLSYPQVNIVKKREVQTGGFSKESILPKGNSDKLIPRKTKDILWETTKYGGFDSPVIAYSILLIADIEKGKAKKLKTVKTLVGITIMEKAAFEENPITFLENKGYHNVRKENILCLPKYSLFELENGRRRLLASAKELQKGNEIVLPVYLTTLLYHSKNVHKLDEPEHLEYIQKHRNEFKDLLNLVSEFSQKYVLADANLEKIQNLYADNEQADIEILANSFINLLTFTALGAPAAFKFFGKDIDRKRYTTVSEILNATLIHQSITGLYETRIDLSKLGED

SEQ ID NO: 748 - protein, 1121 aa, Streptococcus oralis
MNGLVLGLDIGIASVGVGILEKNSGKIIHANSRLFPAATADNNVERRKNRQARRLNRRKKHRGVRFQDLFEDYGLLTDFSKVSINLNPYRLRVDGLNQQLTNEELFIALKNIVKRRGISYLDDASEDGGAVSSDYGKAVEENRKLLAEQTPGQIQLERFEKYGQVRGDFTVVENGEKCRLINVFSTSAYRKEAEKILRKQQEFNNQITDEFIEDYLKILTGKRKYYHGPGNEKSRTDYGRFRTDGTTLDNIFGVLIGKCTFYPNEYRASKSSYTAQEFNLLNDLNNLTVPTETKKLSEEQKKVIVEYAKEAKTLGASTLLKYIVKMIDASVDQISGYRVDVNNKPEMHTFEVYRKMQSLETISVGELSRNVLDELAHILTLNTEREGIEEAINSKLMGVFSQDQVLELVQFRKNNSSLFSKGWHNFSLKLMMELIPELYETSEEQMTILTRLGKQKSKETSKRTKYIDEKELTEEIYNPVVAKSVRQAIKIINEATKKHGIFDNIVIEMARENNEEDAKKDYIKRQKANQDEKNAAMEKAAFQYNGKKELPGNIFNGHKELATKIRLWHQQGEKCLYTGKTIPISDLIHNQYKYEIDHILPLSLSFDDSLSNKVLVHATANQEKGQRTPFQALDSMDDAWSYREFKSYVKDLKSLSNKKKDYLLTEEDISKIEVKQKFIERNLVDTRYSSRVVLNALQDFYKSHQFDTTISVVRGQFTSQLRRKWGLEKSRETYHHHAVDALIIAASSQLRLWKKQNNPLITYKEGQFVDSQTGEIISLTDDEYKELVFKAPYDHFVDTLHSKTFEDGILFSYQVDSKYNRKISDATIYATRKAKLDKDKSEETYVLGKIKDIYSQAGYDAFIKIYNKDKRKFLMYHKDPQTFEKVIEEILRTYPSKERNDKNKEVPCNPFEKYRQENGPIRKYSKKGNGPEIKCLKYYDNKLGNYIDISPDGSDNQVVLQSLKPWRTDVYFNHQTKEYELMGLKYSDLSFEKGSGKYSISNEKYNSIKRIEGVNEQSEFKFTLYKNDLILIKDSENNEQKLFRFNSRNDTAKHYVELKPYDKARFDGQQELITILGNVAKGGQCLKGLNKSNISIFKVKTDVLGKKHIIKKEGDEPKLKF

SEQ ID NO: 749 - protein, 1134 aa, Streptococcus oralis
MNGLVLGLDIGIASVGVGILEKNSGKIVHASSRIFPAATADNNVERRKNRQARRLHRRKKHRGARLKDLFEYYGLLTDFSKVSINLNPYRLRVDGLDQQLTNEELFIALKNIVKRRGISYLDDASEDGGTVSSDYGKAVEENRKLLAEQTPGQIQLERFEKYGQLRGDFTVVENSEKCRLINVFSTSAYKKEAERILRKQQEFNNQITDEFIEDYLKILTGKRKYYHGPGNEKSRTDYGRFRTDGATLDNIFGILIGKCTFYPNEYRASKASYTAQEFNLLNDLNNLTVPTETKKLSEEQKKTIIEYAKSAKTLGASTLLKYIAKMIDASVDQIRGYRVDVNNKPEMHTFEVYRKMQSLETISVGELSRNILDELAHILTLNTEREGIEEAINTKLRDSFSQDQVLELVQFRKNNSSLFSKGWHNFSLKLMMELIPELYETSEEQMTILTRLGKQKSKETSKRTKYIDEKEVTEEIYNPVVAKSVRQAIKIINEATKKHGIFDNIVIEMARENNEEDAKKDYIKRQKANQDEKYAAMEKAAFQYNGKKELPDNIFHGHKELATKIRLWHQQGEKCLYTGKSIPISDLIHNQYKYEIDHILPLSLSFDDSLSNKVLVLATANQEKGQRTPFQALDSMDDAWSYREFKSYVKESKLLGNKKKEYLLTEEDISKIEVKQKFIERNLVDTRYSSRVVLNALQDFYKNHNFDTTISVVRGQFTSQLRRKWGLEKSRETYHHHAVDALIIAASSQLRLWKKQNNPLIAYKEGQFVDSQTGEIISLTDDEYKELVFKAPYDHFVDTLSSKTFEDSILFSYQVDSKFNRKISDATIYATRKAKLDKEKKEYTYTLGKIKDIYSLGTKTPSKTGFYKFLDLYNKDKSQFLMFQKDRKTWDEVIEKIMEQYRPFKEYDKAGKLVDFNPFEKYRQENGPIRKYSKKGNGPEIKSLKYYDILLGKHKNITPEGSRNTVALLSLNPWRTDVYYNMETKKYEFLGLKYADLPFEEGGAYGISTETYNELREKEGIGKNSEFKFTLYKNDLILIKDTETNCQQFFRFWSRTGKDNPKSFEKHKIELKPYEKAKFEKGEELEVLGKVPPSSNQFQKNMQIENLSIYKVKTDVLGNKHFIKKEGDKPKLKF

SEQ ID NO: 750 - protein, 550 aa, Streptococcus oralis
MYSLDKNGSPTPLYRDQLNQYEVDHIIPYSFLPIDSIDNKVLTHRENNQRKLDNIPDKETVANMKPFWEKLYNAKLISQTKYQRLTTSERTPDGVLTESMKAGFIERQLVETRQIIKHVARILDNRFSDTKIITLKSQLVTNFRNTFHIAKIRELNDYHHAHDAYLAVVVGQTLLKAYPKLAPELIYGHHAHFNRHEENKATIRKYLYSNIMRFFNNPDSKVSKDIWDCNRDLPIIKDIIYNSQVNFVKRTMIKKGAFYNQNPVGKFNKQIAANNRYPLKTKVSSLDTSIYGGYGPMNSALSIIIIAERFNEKKCKIETVKEFHDIFIIDYKKFNNDPFQFLNDTSENGFLKKNNINRVLAFYRVPKYSLMQKIDGTRMLFESKSNLHKATQFKLTKTQNELFFHMRRLLTKSNLMDLKSESAIKESQNFILKHKEEFDNISNQLSAFSQKMLGDTTSLKNLIKGYNERKIKEINSSEETIKYFYDNFIKMFSFVKSGAPKDINDFFNNKYTVARMRPKPDKKLLNATLIHQSITGLYETRIDLSKLGED

SEQ ID NO: 751 - protein, 1140 aa, Streptococcus parasanguinis
MNGLVLGLDIGIASVGVGILKKDIGEIIHTNSRLFSAATADSNIERRGHRGGKRLTRRKKHRSIRLHDLFEDFGLLTDFSKVSINLNPYQLRVQGLDNQLTNEELFIALKNIVKRRGISYLDDASEDGGTVSSDYGKAVEENRKLLAEQTPGQIQLDRFEKYGQVRGDFNVVENGEKRRLINVFTTSAYSKEAERILRKQQEFNKKITDEFIEDYLTILTGKRKYYHGPGNEKSRTDYGRYTTKKDPEGKYITLDNIFGILIGKCTFYPDEYRASKASYTAQEFNLLNDLNNLTVPTETKKLSEEQKKTIIKYAKTAKTLGASTLLKYIAKLIGASVDQIHGYRIDPNKKPEMHTFETYRKMQSLETISVEELPRKVLDELAHILTLNTEREGIEEAINATLKDTFSQDQVLELVQFRKNNSSLFSKGWHSFSLKLMMELIPELYETSEEQMTILTRLGKQKSKETSKRTKYIDEKELTEEIYNPVVAKSVRQAIKIINEATKKYGIFDNIVIEMARENNEEDAKKEYIKRQKANLDEKNAAMEKAAFQYNGKKELPDNVFHGHKELATKIRLWHQQGEKCLYTGKNIPISDLIQNQYKYEIDHILPLSLSFDDSLSNKVLVLATANQEKGQRTPFQALDSMDDAWSYREFKSYVKDSKLLGNKKKEYLLTEEDISKIEVKQKFIERNLVDTRYSSRVVLNALQDFYKEHQFDTTISVVRGQFTSQLRRKWGLEKSRETYHHHAVDALIIAASSQLRLWKKQNNPLISYTEGQFVDQVTGEIISLSDDEYKELVFKAPYDHFVDTLKSKKFEDSILFSYQVDSKYNRKISDATIYATRKAKLDKENKEYTYTLGKIKDIYALGTKSPSKTGFYKFLDLYNKDKSQFLMFQKDRKTWDEVIEKIIEQYRPFKEYDENGKEVDFNPFEKYRIENGPIRKYSKKGNGPEIKSLKYYDNLLGKFVDITPSESKNPVALLSLNPWRTDVYYNTETSKYEFLGLKYADLCFEKGGAYGISEVKYNKIREKEGIGKESEFKFTLYKNDLILIKDTETNCQQIFRFWSRTGKDNPKSFEKHKIELKPYEKARFEKGEELEVLGKVPPSSNQLQKNMQIENLSIYKVKTDVLGNKHFIKKEGEEPKLKF

SEQ ID NO: 752 - protein, 1374 aa, Streptococcus pseudoporcinus
MKKRYSYSIGLDIGTNSVGWAVINEDYKVPAKKMTVFGNTDRKTIKKNLLGTVLFDSGETAQARRLKRTNRRRYTRRRYRLCQLQNIFATEMVKVDDTFFQRLSESFFYYQDKAFDKHPIFGNSKEERAYHKTYPTIYHLRKDLADRDQKADLRLIYLALSHIIKFRGHFLIEGKLNSENTDVQKLFIALVTVYNLLFEEEPIAGETCDAKALLTAKTSKSKRLESLISEFPGQKKNGLFGNLLALALGLRPNFKSNFGLSEDAKLQITKDTYEEELDNLLAEIGDHYADLFLAAKNLSDAILLSDILTLSDENTRAPLSASMIKRYEEHQEDLALLKKLVKEQMPEKYWEIFSNAKKNGYAGYIEGKVSQEDFYRYIKPILSRLKGGDEFLAKIDRDDFLRKQRTFDNGSIPHQIHLKELHAILRRQEKYYPFLAEQKEKIEQLLCFRIPYYVGPLAKGGNSSFAWLKRRSDEPITPWNFKDVVDEEASAQAFIEGMTNYDTYLPEEKVLPKHSPLYEMFTVYNELTKVKYIAENMTKPLYLSAEQKEAIIDHLFKQTRKVTVKDLKEKYFSQIEGLENVDVTGVEGAFNASLGTYNDLLKIIKDKAFLDDEANAEILEEIVLILTLFQDEKLIEKRLAKYANLFEKSVLKKLRKRHYRGWGRLSRQLIDGMKDKASGKTILDFLKADDFANRNFIQLINDSSLDFEKLIDDAQKKAIKRESLTEAVANLAGSPAIKKGILQSLKVVDEIVKVMGHNPDNIVIEMSRENQTTAQGLKNARQRLKKIKEVHKKTGSRILEDNSERITNLTLQDNRLYLYLLQDGKDMYTGQDLDINNLSQYDIDHIIPQSFIKDNSIDNLVLTTQKANRGKSDNVPSIEVVRDMKDRVWRRQLANGAISRQKFDHLTKAERGGLADSDKARFLRRQLVETRQITKHVAQLLDSRFNSKSNQNKKLARNVKIITLKSKIVSDFRKDFGLYKLREVNNYHHAHDAYLNAVVGTALLKKYPKLEAEFVYGDYKHFDLVKLISKSDPSLGKATAKVFFYSNIMNFFKEELSLADGTLMKRPVIETNTETGEVVWDKVKDFKTIRKVLSYPQVNIVKKTEIQSGAFSKESVLSKGNSDKLIERKKGWDPKKYGGFDSPNTAYSIFVVAKVAKRKAQKLKTVKEIVGITIMEQAEYEKDNIAFLEKKGYQDIQEKLLIKLPKYSLFELENGRRRLLASANEFQKGNELALSGKYMKFLYLASRYDKLSSKIESEQQKKLFVEQHLHYFDEILDIVVKHATCYIKAENNLKKIISLYKKKEAYSINEQALNMLNLFIFTSLGAPSTFVFFDETIDRKRYTTSSDVLNGILIQQSITGLYETRIDLSRFGGD

SEQ ID NO: 753 - protein, 1052 aa, Streptococcus pyogenes
LSASMIKRYDEHHQDLTLLKALVRQQLPEKYKEIFFDQSKNGYAGYIDGGASQEEFYKFIKPILEKMDGTEELLAKLNREDLLRKQRTFDNGSIPHQIHLGELHAILRRQEDFYPFLKDNREKIEKILTFRIPYYVGPLARGNSRFAWMTRKSEETITPWNFEEVVDKGASAQSFIERMTNFDKNLPNEKVLPKHSLLYEYFTVYNELTKVKYVTEGMRKPAFLSGEQKKAIVDLLFKTNRKVTVKQLKEDYFKKIECFDSVEISGVEDRFNASLGTYHDLLKIIKDKDFLDNEENEDILEDIVLTLTLFEDREMIEERLKTYAHLFDDKVMKQLKRRRYTGWGRLSRKLINGIRDKQSGKTILDFLKSDGFANRNFMQLIHDDSLTFKEDLQKAQVSGQGDSLHEHIANLAGSPAIKKGILQTVKVVDELVKVMGRHKPENIVIEMARENQTTQKGQKNSRERMKRIEEGIKELGSDILKEYPVENTQLQNEKLYLYYLQNGRDMYVDQELDINRLSDYDVDHIVPQSFLKDDSIDNKVLTRSDKNRGKSDNVPSEEVVKKMKNYWKQLLNAKLITQRKFDNLTKAERGGLSELDKAGFIKRQLVETRQITKHVAQILDSRMNTKYDENDKLIREVRVITLKSKLVSDFRKDFQFYKVREINNYHHAHDAYLNAVVGTALIKKYPKLESEFVYGDYKVYDIRKMIAKSEQEIGKATAKYFFYSNIMNFFKTEITLANGEIRKRPLIETNGETGEIVWDKGRDFATVRKVLSMPQVNIVKKTEVQTGGFSKESILPKRNSDKLIARKKDWDPKKYGGFDSPTVAYSVLVVAKVEKGKSKKLKSVKELVGITIMERSSFEKDPVDFLEAKGYKEVRKDLIIKLPKYSLFELENGRKRMLASAGELQKGNELALPSKYVNFLYLASHYEKLKGSPEDNEQKQLFVEQHKHYLDEIIEQISEFSKRVILADANLDKVLSAYNKHRDKPIREQAENIIHLFTLTNLGAPAAFKCFDTTIGRNRYKSIKEVLDATLIHQSITGLYETRIDLSQLGGD

SEQ ID NO: 754 - protein, 1368 aa, Streptococcus pyogenes; identical to SEQ ID NO: 42

SEQ ID NO: 755 - protein, 1367 aa, Streptococcus pyogenes; identical to SEQ ID NO: 246

SEQ ID NO: 756 - protein, 1368 aa, Streptococcus pyogenes [sequence omitted]

SEQ ID NO: 757 - protein, 1370 aa, Streptococcus ratti
MKKPYSIGLDIGTNSVGWAVITDDYKVPAKKMKVLGNTDKNYIKKNLLGALLFDSGNTAEDRRLKRTARRRYTRRRNRLLYLQDIFSDEMNKVDESFFHRLEDSFLVSEDKRGDHHPIFGNVVDEVKYHEQFPTIYHLRKYLADTPEKADLRLVYLALAHMIKFRGHFLIDDPKLDVKNTDSQELFSQFLTAYDVTQEDSHLADVKINISDIITEKMNKSRKVEALLFHFPSQKKNSFFGNLVSLVFGLLPNFKTNFNLAEDAKLQLSKDSYDEDLENLLGQIGDEYTDVFVAARKLYDSILLSGILTVNDLSTKAILSASMVRRYEEHNKDLAKLKAFVKANFTHDVFKEVFSDASKNGYAGYIEGKTSQEDFYKYVKNLIGKVDGSADFIEKIDREDFLRKQRTFDNGSIPHQVHLAEMKAILRRQGEYYPFLKEHAEKIQQILTFRIPYYVGPLDRHGHSDFAWASFNSEEKVTPWNFEEIIDKNKSAQAFIERMTNQDLYLPNEKVLPKHSPLYEKYTVYNELTKIKYVTETGTAKFFDANLKQEIFDGLFKKERKVTKRKLLTFLEKNFDEFRIVDIQGLDKETETFNASYGIYQDLLKIIKDKAFMDDSENADILEDIVLTLTLFEDREMIKQRLAKYADLFDKKVIDNLARRRYTGWGRLSAKLLNGIRDKRSRKTIMDYLVDDGRSNRNLMQLITDDNLTFKDEIAKAQYSDNSDDLHQVVQDLAGSPAIKKGILQSVKIVDELVKVMGYEPEQIVVEMARENQTTAKGRRNSQQRYKRLEEAIKNLDRDLNYKILKEHPTDNQALQNDRLFLYYLQNGRDMYTGESLDINRLSDYDIDHIIPQAFIKDNSIDNRVLVSSAKNRGKSDDVPSEDVVNRMRPFWNKLLNCGLISQRKYSNLTKKELTPNDKAGFIKRQLVETRQITKHVARILDEHFNKEFDEDKKRIRKVKVVTLKSNLVSNFRKEFELYKVREINDYHHAHDAYLNAVVAKALLMKYPKLEPEFVYGEYPKYNSYRERKTATQRMFFYSNIMNMFKSKVKLADERIIERPMIEVNDETGEIAWDKTKHIATVKKVLSYPQINIVKKVEEQTGGLTNETIYPRGSFDKLLNRKNTLEASKYGGFGSPTVAYCVLVVADSKNENGKVKKLKLGSELLGITILEKNDFENNSLDFLSRKGYQGVQEKKIIKLPKYSLFEFQDGSRRMLSSVMANDNKRGDLQKANEMILPAYLVKLLYHAKHINSVGEPAHKNYINEHCSEFQDLLNYIRQFADKFVDVDKNLSKIRSLSKSMAEYSVSEICSSFVNLLTLTALGAPADFKFFGTTIPRKRYGSPQSILSATLIHQSITGLYETRIDLSKLGED

SEQ ID NO: 758 - protein, 1135 aa, Streptococcus salivarius
MSDLVLGLDIGIGSVGVGILNKVTGEIIHKNSRIFPAAQAENNLERRTNRQGRRLTRRKKHRRVRLNHLFEESGLITDFTKVSINLNPYQLRVKGLTAELSNEELFIALKNMVKHRGISYLDDASDDGNSSVGDYAQIVKENSKQLETKTPGQIQLERYQKYGQLRGDFTVEEDGRKHRLINVFPTSAYHAEALRILQTQQEFNPQITDEFINSYLEILTGKRKYYHGPGNEKSRTDYGKYTTKKDAQGQYITLNNIFGILIGKCTFYPEEYRAAKASYTAQEFNLLNDLNNLTVPTETKKLSEEQKYQIITYVKNEKAMGPAKLFKYIAKLLACDIADIKGYRIDKSDKAEIHTFEAYRKMKTLETIDIEQIEREKLDKLAYVLTLNTEREGIQEALDHEFADGTFSQEQVDELVQFRKANSSIFGKGWHSFSVKLMMELIPELYATSEEQMTILTRLGKQKTTSSSNKTKYIDEKQLTEEIYNPVVAKSVRQAIKIVNAAIKKYGDFDNIVIEMARETNEDDEKKAIQKIQKANKAEKDAAMRKAANQYNGKAELPHSVFHGHKQLATKIRLWHQQGERCLYTGKTISIHDLINNPNQFEIDHILPLSITFDDSLANKVLVYATANQEKGQRTPYQALDSMDDAWSFRELKAFVRESKALSNKKKEYLLTEEDISKFDVRKKFIERNLVDTRYASRVVLNALQEHFKAHKIDTKVSVVRGQFTSQLRRHWGIDKTRDTYHHHAVDALIIAASSQLNLWKKQKNTLVSYSEDQLLDIETGELISDDEYKESVFKAPYQHFVDTLKSKEFEDSILFSYQVDSKFNRKISDATIYATRQAKVGKDKKDETYVLGKIKDIYALGTKTPSKTGFYKFLDLYNKDKSQFLVYQKDRKTWDEVIEKIMEQYRPFKESDKNGKEVDFNPFEKYRIENGPIRKYSRKGNGPEIKSLKYYASKLGNHIDITPKDSNNKVVLQSVSPWRADVYFNKTTGSYEILGLKYADLQFEKGTGTYRISEEKYNDIKKKEGVDSDSEFKFTLYKNDLLLIKDTETKEQRLFRFLSRSMPNKKHYVELKPYSKDKFEKNESLIEILGSADKSGRCIKGLAKSNLSIFKVRTDVLGNQHIIKNEGDKPKLDF

SEQ ID NO: 759 - protein, 1127 aa, Streptococcus salivarius
MSDLVLGLDIGIGSVGVGILNKVTGEIIHKNSRIFPAAQAENNVERRINRQGRRLTRRKKHRRVRLNHLFEESGLITDFTNVSINLNPYQLRVKGLTDELSNEELFIALKNMVKHRGISYLDDASDDGNSSVGDYAQIVKENSKQLETKTPGQIQLERYQKYGQLRGDFTVEEDGKKHRLINVFPTSAYRAEALRILQTQQEFNPQITDEFINSYLQILTGKRKYYHGPGNEKSRTDYGRYTTKKDSEDEYITLDNIFGILIGKCTFYPEEYRAAKASYTAQEFNLLNDLNNLTVPTETKKLSEEQKNQIITNVKNEKAMGPAKLFKYIAKLLSCDVADIKGYRIDKSDKAEIHTFEAYRKMKTLATIDIEQMERENLDKLAYVLTLNTEKEGIQEALEHEFADGTFSQEQIDELVQFRKANSSIFGKGWHSFSVKLMMELIPELYATSEEQMTILTRLGKQKTTSSSNKTKYIDEKQLTEEIYNPVAAKSVRQAIKIVNAAIKEYGDFDNIVIEMARETNEDDEKKAIQKIQKANKDEKDAAMLKAANQYNGKAELPHSVFHGHKQLATKIRLWHQQGERCLYTGKTISIHDLINNSNQFEIDHILPLSITFDDSLANKVLVYATANQEKGQRTPYQALDSMDDAWSFRELKAFVRDSKALSNKKKEYLLTEEDISKFDVRKKFIERNLVDTRYASRVVLNALQEHFRVHKTDTKVSVVRGQFTSQLRRHWGIEKTRDTYHHHAVDALIIAASSQLNLWKKQKNTLVSYSEDQLLDIETGELISDDEYKESVFKAPYQHFVDTLKSKEFEDSILFSYQVDSKFNRKISDATIYATRQAKVGKDKKDETYVLGKIKDIYSQTGYDAFIKIYKKDKSKFLMYRHDPQTFEKVIEPILENYPNKELNEKGKEVPCNPFLKYKEDHGYIRKYSKKGNGPEIKSLKYYDSKLGNHIDITPKNSNNKVVLQSVSPWRADVYFNKTTGKYEILGLKYADLKFEKGTGTYKISEEKYNDIKIKEGVDSDSEFKFTLYKNDLLLIKDTETKEQQLFRFLSRTMPNVKHYVELKPYDKQKFDDNEELIKILGIVAKGGQCKKGVSKPNISIYKIRTDVLGNQHIIKNEGDKPKLDF

SEQ ID NO: 760 - protein, 1385 aa, Streptococcus salivarius
MTKPYSIGLDIGTNSVGWAVITDDYKVPSKKMKVLGNTSKKYIKKNLLGALLFDSGITAEGRRLKRTARRRYTRRRNRILYLQEIFSTEMATLDDAFFQRLDDSFLVPDDKRDSKYPIFGNLVEEKVYHDEFPTIYHLRKHLADSSKKADLRLVYLALAHMIKYRGHFLIEGDFNSKNNDLQKNFQDFLDTYNAIFESDLSLENSKQLEEIVKDKISKSAKKDRILKLFPGEKNSGIFSEFLKLIVGNQADFRKYFNLDEKTSLQFSKESYDEDLETLLGHIGDDYSDVFLKAKKLYDAILLSGILTVTDNGTEAPLSSAMIMRYKEHEEDLALLKAYIRNISLETYNEVFKDNTKNGYAGYIDGKTSQEDFYVYLKRLLAGLEGADYFLEKIDREDFLRKQRTFDNGSIPYQIYLQEMRAILDKQAKFYPFLAKNKERIEKILTFRIPYYVGPLARGNSDFAWSIRKRNEKITPWNFEDVIDKESSAEAFINRMTSFDLYLPEEKVLPKHSLLYENFTVYNELTKVRFIAEGMRDYQFLDSKQKKDIVRLYFKGKRKVTDKDIIEYLHAIDGYDGIELKGIEKQFNSSLSTYHDLLNIINDKEFLDDSSNETIIEEIIHTLTMFEDREMIKQRLSKFDNIFDKSVLKKLSRRHYTGWGKLSAKLINGIRDEKSGNTILDYLIDDGVSNRNFMQLIHDDALSFKKKIKKAQIIGDKDNIKQVVKSLPGSPAIKKGILQSIKIVDELVKVMGREPESIVVEMARENQYTNQGKSNSQQRLKRLEESLKGLGSKILKENVPTRLSKIDNNALQNDRLYLYYLQNGKDMYTGEELDIDRLSNYDIDHIIPQAFLKDDSIDNKVLVSSASNRGKSDDVPSLEVVKKRKTLWYQLLKSKLISQRKFDNLTKAERGGLSQEEKAGFIQRQLVETRQITKHVARLLDERFNNKKDENNRTLRTVKIITLKSSLVSQFRKDFELYKVREINDFHHAHDAYLNAVVASALLKKYPKLEPEFVYGDYPKYNSFRERKSATEKVYFYSNIMNIFKKSIPLADGTVIDRPLIEVNEETGESVWNKVADLNTVRKVLSYSQVNIVKKVEEQNHGLDRGKPKGLFNANLSSKPKPNSKENLVGAKEYLDPKKYGGYAGISNSFAILVKGTIEKGAKKKITNVLEFQGISILDRIYYRKDKLNFLLEKGYKDIELIIELPKYSLFELSDGSRRMLASILSTNNKRGEIHKGNQIFISQKFVKLLYHAKRISSTFNENHRKYVENHKKEFEELFYYILEFNENYVGAKKNGELLKSAFQSWQNHSIDELCSSFIGPTGSERKGLFELTSRGGAADFEFLGVKIPRYRDYTPSSLLKDATLIHQSVTGLYETRIDLGKLGED

SEQ ID NO: 761 - protein, 1392 aa, Streptococcus sanguinis
MENKNYSIGLDIGTNSVGWAVITDDYKVPSKKMKVFGNTDKHFIKKNLIGALLFDEGATAEDRRLKRTARRRYTRRKNRLRYLQEIFSEEISKLDSSFFHRLDDSFLVPKDKRGSKYPIFATLEEEKEYHKKFPTIYHLRKHLADSKEKTDLRLIYLALAHMIKYRGHFLYEESFDIKNNDIQKIFNEFISIYDNTFEGSSLSGQNAQVEAIFTDKISKSAKRERVLKLFSDEKSTSLFSEFLKLIVGNQADFKKHFDLEEKAPLQFSKDTYDEDLENLLGQIGDGFTDLFLVAKKLYDAILLSGILTVTDPSTKAPLSASMIERYESHQKDLAALKQFIKNNLPKRYNEVFSDQSKDGYAGYIDGKTTQEAFYKYIKNLLSKFEGADYFLDKIEREDFLRKQRTFDNGSIPHQIHLQEMNAILRRQGEHYPFLKENREKIEKILTFRIPYYVGPLARGNRDFAWLTRNSDQAIRPWNFEEIVDKASSAEEFINKMTNYDLYLPEEKVLPKHSLLYETFAVYNELTKVKFIAEGLRDYQFLDSGQKKQIVNQLFKEKRKVTEKDIIHYLHNVDGYDGIELKGIEKQFNASLSTYHDLLKIIKDKEFMDDPKNEEILENIVHTLTIFEDREMIKQRLAQYDSIFDEKVIKALTRRHYTGWGKLSAKLINGICDKQTGDTILDYLIDDGKINRNFMQLINDDGLSFKEIIQKAQVVGKTDDVKQVVQELPGSPAIKKGILQSIKIVDELVKVMGYAPESIVIEMARENQTTARGKKNSQQRYKRIEDSLKNLAPGLDSNILKENPTDNIQLQNDRLFLYYLQNGKDMYTGKPLDIDQLSSYDIDHIIPQAFIKDDSIDNRVLTSSKDNRGKSDNVPSLEVVQKRKAFWQQLLDSKLISERKFNNLTKAERGGLDERDKVGFIRRQLVETRQITKHVAQILDASFNTEVNEKNQKIRTVKIITLKSNLVSNFRKEFELYKVREINDYHHAHDAYLNAVVAKAILKKYPKLEPEFVYGDYQKYDLKRYISRFKPSKEIEKATEKYFFYSNLLNFFKEEVHYADGIIVKRENIEYSKDTGEIAWNKEKDFATIKKVLSYPQVNIVKKTEIQTHGLDRGKPKGLFNSNPSPKPSEDSKENLVPIKQGLDPRKYGGYAGISNSYAVLVKAIVEKGAKKQQKTILEFQGISILDKINFENNKENYLLKKRYIEILSTITLPKYSLFEFPDGTRRRLASILSTNNKRGEIHKGNELVLPGKYTTLLYHAKNINKKLEPEHLEYVEKHRNDFAKLLECVLNFNDKYVGALKNGERIRQAFTDWETVDIEKLCFSFIGPENSKNAGLFELTSQGSASDFEFLGVKIPRYRDYAPSSLLKATLIHQSITGLYETRIDLSKLGED

SEQ ID NO: 762 - protein, 1377 aa, Streptococcus sanguinis
MKKPYSIGLDIGTNSVGWAVITDDYKVPSKKMKVLGNTDKHFIKKNLIGALLFDEGTTAEDRRLKRTSRRRYTRRKNRLRYLQEIFSEEISKLDSSFFHRLDDSFLVPEDKRGSKYPIFATLEEEKEYHKKFPTIYHLRKHLADSKEKTDLRLIYLALAHMIKYRGHFLYEESFDIKNNDIQKIFNEFISIYDNTFEGSSLSGQNAQVEAIFTDKISKSTKRERVLKLFSDEKSTGLFSEFLKLIVGNQADFKKHFDLEEKAPLQFSKDTYDEDLENLLGQIGDGFADLFLVAKKLYDAILLSGILTVTDPSTKAPLSASMIERYENHQEDLAALKQFIKNNLSEKYAEVFSDQSKDGYAGFIDGKTTQEAFYKYIKNLLSKLEGADYFLNKIEREDFLRKQRTFDNGSIPHQIHLQEMNAILRRQGEHYLFLKENREKIEKILAFRIPYYVGPLARGNRDFAWLTRNSDQAIRPWNFEEVVDKASSAEDFINKMTNYDLYLPEEKVLPKHSLLYETFAVYNELTKVKFIAEGLRDYQFLDSGQKKQIVNQLFKDKRKVTEKDIIHYLHNVDGYDGIELKGIEKQFNASLSTYHDLLKIIKDKEFMDNPKNGEILENIIHTLTIFEDREMIKQRLAQYDTLFDEKVIKALTRRHYTGWGKLSAKLINGIRDKQTGKTILEYLIDDGDCNRNFMQLINDDGLSFKEIIQKAQVVGKTDDVKQVVQEIPGSPAIKKGILQSIKIVDELVKVMGHNPESIVIEMARENQTTAKGKKNSQQRYKRIEDALKNLAPGLDSNILKENPTDNIQLQNDRLFLYYLQNGKDMYTGKAIDINQLSNYDIDHIIPQAFIKDDSLDNRVLTSSKDNRGKSDNVPSIEVVQKRKAFWQQLLDSKLISERKFNNLTKAKRGGLDERDKVGFIKRQLVETRQITKHVAQLLDTRFNTEVNEENQKIRTVKIITLKSNLVSNFRKEFGLYKVREINDYHHAHDAYLNAVVAKAILKKYPKLEPEFVYGDYQKYDLKRYILKSKASNTIDKATEKYFFYSNLLNFFKEKVRYADGTIKKRENIEYSNDTGEIAWNKEKDFATIKKVLSLPQVNIVKKTEEQTVGQNGGLFDNNIVSKKKVVDASKLIPIKSSLSPEKYGGYARPTIAYSVLVIADIEKGKGKAKKLKRIKEIVGITIQDKKKFESNPVTYLEECGYKNINSNLIIKLPKYSLFEFNDGQRRLLASSIELQKGNELILPYHLTALLYHAQRINKISEPIHKQYVEAHQNEFKELLTTIISLSKKYIQKPNVELLLQQAFDQADKDIYQLSESFISLLKLTSFGAPGAFKFLGVEISQSSVRYKPNSQFLDTTLIHQSITGLYETRIDLSKLGED

SEQ ID NO: 763 - protein, 1370 aa, Streptococcus sanguinis
MKKPYSIGLDIGTNSVGWAVVTDDYKVPAKKMRVFGDTDRSHIKKNLLGTLLFDDGNTAESRRLKRTARRRYTRRRNRILYLQEIFTESMNEIDESFFHRLDDSFLVPEDKRGSKYPIFATLQEEKEYHKQFPTIYHLRKQLADSKEKSDVRLIYLALAHMIKYRGHFLYEETFDIKNNDIQKIFNEFINIYDNTFEGSSLSGQNAQVEAIFTDKISKSAKRERVLKLFPDEKSTGLFSEFLKLIVGNQADFKKHFDLEEKAPLQFSKDTYDEELENLLGQIGDDFADLFLIAKKLYDAILLSGILTVTDPSTKAPLSASMIERYENHQKDLAALKQFIKNNLPEKYVEVFSDQSKDGYAGYIDGKTTQEAFYKYIKNLLSKFEGADYFLDKIEREDFLRKQRTFDNGSIPHQIHLQEMNAILRRQGEHYPFLKENREKIEKILTFRIPYYVGPLARDNRDFSWLTRNSDEPIRPWNFEEVVDKARSAEDFIHRMTNYDLYLPEEKVLPKHSLLYETFAVYNELTKVKFIAEGLRDYQFLDSGQKKQIVNQLFKEKRKVTEKDIIHYLHNVDGYDGIELKGIEKQFNANLSTYHDLLKITKDKEFMDDPKNEEILENIVHTLTIFEDREMIKQRLAQYDTLFDEKVIKALTRRHYTGWGKLSAKLINGIRDKQSGKTILDYLIDDDKINRNFMQLINDDGLSFKEIIQKAQVVGKTDDVKQVVQELPGSPAIKKGILQSIKIVDELVKVMGYALESIVIEMARENQTTARGKKNSQQRYKRIEDALKNLAPGLDSNILKENPTDNIQLKNDRLFLYYLQNGKDMYTGKPLDINQLSSYDIDHIIPQAFIKDDSIDNRVLTSSKDNRGKSDNVPSLEVVQKRKAFWQQLLDSKLISERKFNNLTKAERGGLDERDKVGFIRRQLVETQQITKNVAQILDARFNTEVKEKNQKIRTVKIITLKSNLVSNFRKEFGLYKVREINNYHHAHDAYLNAVVAKAILKKYPKLEPEFVYGDYQKYDLKKYISRFKPSKEIEKATEKYFFYSNLLNFFKEEVLYADGTIRKRENIEYSKDTGEIAWDKEKDFATIKKVLSYPQVNIVKKREVQTGGFSKESILPKGNSDKLIPRKTKDILWDTTKYGGFDSPVIAYSILLIADIEKGKAKKLKTVKTLVGITIMEKAAFEENPITFLENKGYHNVRKENILCLPKYSLFELENGRRRLLASAKELQKGNEIVLPVCLTTLLYHSKNLHKLDEPEHLEYIQKHRNEFKDLLNLVSEFSQKYILAEANLEKIKDLYADNEQADIEILANSFINLLTFTALGAPAAFKFFGKDVDRKRYTTVSEILNATLIHQSITGLYETRIDLSKLGEE

SEQ ID NO: 764 - protein, 1421 aa, Streptococcus sanguinis
MTKFNKNYSIGLDIGVSSVGYAVVTEDYRVPAFKFKVLGNTEKEKIKKNLIGSTTFVSAQPAKGTRVFRVNRRRIDRRNHRITYLRDIFQKEIEKVDKNFYRRLDESFRVLGDKSEDLQIKQPFFGDKELETAYHKKYPTIYHLRKHLADADKNSPVADIREVYMAISHILKYRGHFLTLDKINPNNINMQNSWIDFIESCQEVFDLEISDESKNIADIFKSSENRQEKVKKILPYFQQELLKKDKSIFKQLLQLLFGLKTKFKDCFELEEEPDLNFSKENYDENLENFLGSLEEDFSDVFAKLKVLRDTILLSGMLTYTGATHARFSATMVERYEEHRKDLQRFKFFIKQNLSEQDYLDIFGRKTQNGFDVDKETKGYVGYITNKMVLTNPQKQKTIQQNFYDYISGKITGIEGAEYFLNKISDGTFLRKLRTSDNGAIPNQIHAYELEKIIERQGKDYPFLLENKDKLLSILTFKIPYYVGPLAKGSNSRFAWIKRATSSDILDDNDEDTRNGKIRPWNYQKLINMDETRDAFITNLIGNDIILLNEKVLPKRSLIYEEVMLQNELTRVKYKDKYGKAHFFDSELRQNIINGLFKNNSKRVNAKSLIKYLSDNHKDLNAIEIVSGVEKGKSFNSTLKTYNDLKTIFSEELLDSEIYQKELEEIIKVITVFDDKKSIKNYLTKFFGHLEILDEEKINQLSKLRYSGWGRYSAKLLLDIRDEDTGFNLLQFLRNDEENRNLTKLISDNTLSFEPKIKDIQSKSTIEDDIFDEIKKLAGSPAIKRGILNSIKIVDELVQIIGYPPHNIVIEMARENMTTEEGQKKAKTRKTKLESALKNIENSLLENGKVPHSDEQLQSEKLYLYYLQNGKDMYTLDKTGSPAPLYLDQLDQYEVDHIIPYSFLPIDSIDNKVLTHRENNQQKLNNIPDKETVANMKPFWEKLYNAKLISQTKYQRLTTSERTPDGVLTESMKAGFIERQLVETRQIIKHVARILDNRFSDTKIITLKSQLITNFRNTFHIAKIRELNDYHHAHDAYLAVVVGQTLLKVYPKLAPELIYGHHAHFNRHEENKATLRKHLYSNIMRFFNNPDSKVSKDIWDCNRDLPIIKDVIYNSQINFVKRTMIKKGAFYNQNPVGKFNKQLAANNRYPLKTKALCLDTSIYGGYGPMNSALSIIIIAERFNEKKGKIETVKEFHDIFIIDYEKFNNNPFQFLNDTSENGFLKKNNINRVLGFYRIPKYSLMQKIDGTRMLFESKSNLHKATQFKLTKTQNELFFHMKRLLTKSNLMDLKSKSAIKESQNFILKHKEEFDNISNQLSAFSQKMLGNTTSLKNLIKGYNERKIKEIDIRDETIKYFYDNFIKMFSFVKSGAPKDINDFFDNKCTVARMRPKPDKKLLNATLIHQSITGLYETRIDLSKLGED

SEQ ID NO: 765 - protein, 317 aa, Streptococcus sp.
FEDSILFSYQVDSKFNRKISDATIYATRKAKLDKEKSEETYVLGKIKDIYSQAGYDAFIKIYNKDKSKFLMYHKDPQTFEKVIEEILRTYPSKELNDKNKEIPCNPFEKYRQENGPIRKYSKKSNGPEIKSLKYYDNKLGNHIDITPESSDNQVVLQSLKPWRTDVYFNHQTKKYELMGLKYSDLSFEKGSGKYSISNQKYNSIKRIEGIDEQSEFKFTLYKNDLILIKDSENNEQKLFRFNSRNDTAKHYIELKPYDKAKFDGEQELITILGNVAKGGRCLKGLNKSNISIFKVKTDVLGKKHIIKKEGDEPKLKF

SEQ ID NO: 766 - protein, 1420 aa, Streptococcus sp.
MAKFNKNYSIGLDIGVSSVGYAVVTEDYRVPAFKFKVLGNTEKEKIKKNLIGSTTFVPAQSAQGTRVFRVNRRRIDRRNHRIAYLRDIFQKEIEKIDKNFYRRLDESFRVLGDKSEDIQIKQPFFGNKELETAYHKKYPTIYHLRKHLADADKNSPVADIREVYMVLSHILKYRGHFLTLGKIDPNNINMQNSWIDFIESCQDAFDLEISDESKTIAAIFKSSENRQEKVKQILSYFQQELLKKDKSIFKQLLQLLFGLKTKFKDCFELEEEPDLNFSKENYDENLENLLGALEEDFSDVFAKLKILRDTILLSSMLTYTGATHARFSATMVERYEEHRKDLQRFKSFVKQNLSEQDYLDIFGRKTPTGFDVDKETKGYVGYISNKMVLTNPQKQKTIQQNFYDYISGKITGIEGAECFLNKISDGTFLRKLRTTDNGAIPNQIHAYELEKIIERQGRDYPFLLENKDKLLSILTFKIPYYVGPLAKGNNSRFAWIKRTTSQDVLDDNDEDTRNGKIRPWNYHKLINMDETRDAFIINLIGNDIILLNEKVLPKRSLIYEEVMLQNELTRVKYKDKYGKIHFFNSELRQEIINNLFKTNSKRVSSAMLLSYLENFTNLQAVEIVSGIEKGKSLNSTLKTYNDLKTIFSEELLDSEIYQKELEEIIKVITVFDDKKSIKNYLTKYFGHLEFLNEEKINQLSKLRYTGWGRYSGKLLLGIRDEDTGFNLMQFLRNDDENRNLTQLISDTTLSFDSAIKAIQSKSTVEDDVFEEIKNLAGSPAIKRGILNSIKIVDELVQIIGYPPQNIIIEMARENMTTEEGQKKAKTRKSKLESALKNIEDSVLESGKVPHSDEQLQSEKLYLYYLQNGKDMYSLDKTGSPTPLYRDQLDQYEVDHIIPYSFLPIDSIDNKVLTHRENNQRKLNNIPDKETVANMKPFWEKLYNAKLISQTKYQRLTTSERTPDGVLTESMKAGFIERQLVETRQIIKHVARILDNRFSDTKIITLKSQLVTNFRNTFHIAKIRELNDYHHAHDAYLAVVVGQTLLKAYPKLAPELIYGHHAHFNRHEENKATLRKHLYSNIMRFFNNPDSKVSKDIWDCNRDLPIVKDVIYNSQINFVKRTMIKKGAFYNQNPVGKLNKQIAANNRYPLKTKVSSLDTSIYGGYGPMNSALSIIIIAERFNEKKGKIETVKEFHDIFIIDYEKFNNNPFQFLNNVSEEGFLKKNDLNRVLAFYRISKYSLMQKIDGTRMLFESKSNLHKVTQFKLTKTQNELFFHMKRLLTKSNLMDLKSESAIKESQNFIQTHQNEFDNIADRLSNYSQKMLGETKSLQTLINGYNERPIKQIDNNEETIRYYYDNFIKMFSFVKSGAPKDIINFFNDKYTVPRMRPKPDRKMLDATLIHQSITGLYETRIDLSKLGED

SEQ ID NO: 767 - protein, 1371 aa, Streptococcus sp.
MENKNYSIGLDIGTNSVGWSVITDDYKVPSKKMKVLGNTDKHFIKKNLIGALLFDEGTTAEARRLKRTARRRYTRRKNRLRYLQEIFSEEIGKVDSSFFHRLDDSFLIPEDKRGSKYPIFATLAEEKKYHKQFPTIYHLRKQLADSKEKTDLRLIYLALAHMIKYRGHFLYEEAFDIKNNDIQKIFNEFISIYNNTFEGNSLSGQNVQVEAIFTDKISKSAKRERVLKLFPDEKSTGLFSEFLKLIVGNQADFKKHFDLEEKAPLQFSRDTYDEDLENLLGQIGDDFADLFLVAKKLYDAILLSGILTVTNPSTKAPLSASMIERYENHQKDLASLKQFIKNNLPEKYDEVFSDQSEDGYAGYIDGKTTQETFYKYIKNLLSKFEGADYFLDKIEREDFLRKQRTFDNGSIPHQIHLQEMNAILRRQGEHYPFLKENKEKIEKILTFRIPYYVGPLARGNRDFAWLTRNSDQAIRPWNFEEIVDKASSAEDFINKMTNYDLYLPEEKVLPKHSLLYETFAVYNELTKVKFIAEGLRDYQFLDSGQKKQIVTQLFKEKRKVTEKDIIQFLHNVDGYDGIELKGIEKQFNASLSTYHDLLKIIKDKAFMDDAKNEAILENIVHTLTIFEDREMIKQRLAQYDSLFDEKVIKALTRRHYTGWGKLSAKLINGISDKQTGNTILDYLIDDGEINRNFMQLINDDGLSFKEIIQKAQVVGKTNDVKQVVQELPGSPAIKKGILQSIKIVDELVKVMGHAPESIVIEMARENQTTARGKKNSQQRYKRIEDSLKILASGLNSKILKEHPTDNIQLQNDRLFLYYLQNGKDMYTGEALDINQLSSCDIDHIIPQAFIKDDSLDNRVLTSSKDNRGKSDNVPSLEVVDKMKVFWQQLLDSKLISYRKFNNLTKAERGGLNELDKVGFIKRQLVETRQITKHVAQILDARFNKEVTEKDKKNRTVKIITLKSNLVSNFRKEFELYKVREINDYHHAHDAYLNAVVAKAILKKYPKLEPEFVYGDYQKYDLKRYISRSKDPKEIEKATEKYFFYSNLLNFFKEEVHYADGTIVKRENIEYSKDTGEIAWNKEKDFATIKKVLSLPQVNIVKKREVQTGGFSKESILPKGNSDKLIPRKTKDILWDTTKYGGFDSPVIAYSILLIADIEKGKAKKLKTVKTLVGITIMEKDAFEKNPIAFLENKGYHNVCKENILCLPKYSLFELENGRRRLLASAKELQKCNEIVLPVYLTTLLYHSKNVHKLDEPGHLEYIQKHRNEFKDLLNLVSEFSQKYVLADANLEKIKNLYADNEQADIEILANSFINLLTFTALGAPAAFKFFGKDVDRKRYTTVSEILNATLIHQSITGLYETRIDLSKLGED

SEQ ID NO: 768 - protein, 93 aa, Streptococcus sp.
MILIKDSENNEQKLFRFNSRNDTAKHYVELKPYDKARFDGQQELITILGNVAKGGQCLKGLNKSNISIFKVKTDVLGKKHIIKKEGDEPKLKF

SEQ ID NO: 769 - protein, 1121 aa, Streptococcus sp.
MNGLVLGLDIGIASVGVGILEKNSGKIIHANSRLFPAATADNNVERRKNRQARRLHRRKKHRGVRFQDLFEDYGLLTDFSKVSINLNPYRLRVDGLNQQLTNEELFIALKNIVKRRGISYLDDASEDGGTVSSDYGKAVEENRKLLAEQTPGQIQLERFEKYGQVRGDFTVVENGEKRRLINVFSTSAYRKEAERILRKQQEFNSKITDEFIEDCLKILTGKRKYYHGPGNEKSRTDYGRFRTDGTTLDNIFGILIGKCTFYPDEYRASKASYTAQEFNLLNDLNNLTVPTETKKLSEEQKKVIVEYAKEAKTLGASTLLKYIAKMIDASVDQIRGYRVDVNNKPEIHTFEAYRKMQSLETISVGELSRNVLDELAHILTLNTEREGIEEAINTKLKDSFSQDQVLELVQFRKNNSSLFSKGWHNFSLKLMMELIPELYETSEEQMTILTRLGKQKSKEISKRTKYIDEKELTEEIYNPVVAKSVRQAIKIINEATKKHGIFDNIVIEMARENNEEDAKKDYIKRQKANQDEKNAAMEKAAFQYNGKKELPDSIFHGQKELATKIRLWHQQGEKCLYTGKNIPISDLIHNQYKYEIDHILPLSLSFDDSLSNKVLVLATANQEKGQRTPFQALDSMDDAWSYREFKSYVKESKLLGNKKKEYLLTEEDISKIEVKQKFIERNLIDTRYSSRVVLNALQDFYKAHKFDTTISVVRGQFTSQLRRKWGLEKSRETYHHHAVDALIIAASSQLRLWKKQNNPLIAYKEGQFVDSETGEIISLSDDEYKELVFKAPYDHFVDTLSSKTFEDSILFSYQVDSKFNRKISDATIYATRKAKLDKEKSEETYVLGKIKDIYSQAGYDAFIKIYNKDKSKFLMYHKDPQTFEKVIEEILRTYPSKELNDKNKEIPCNPFEKYRQENGPIRKYSKKSNGPEIKSLKYYDNKLGNHIDITPESSDNQVVLQSLKPWRTDVYFNHQTKKYELMGLKYSDLSFEKGSGKYSISNQKYNSIKRIEGIDEQSEFKFTLYKNDLILIKDSENNEQKLFRFNSRNDTAKHYIELKPYDKAKFDGEQELITILGNVAKGGRCLKGLNKSNISIFKVKTDVLGKKHIIKKEGDEPKLKF

SEQ ID NO: 770 - protein, 1026 aa, Streptococcus sp.
MNGLVLGLDIGIASVGVGILEKNSGKIIHANSRLFPAATADNNVERRKNRQARRLNRRKKHRGVRFQDLFEDYGLLTDFSKVSINLNPYRLRVDGLNQQLTNEELFIALKNIVKRRGISYLDDASEDGGAVSSDYGKAVEENRKLLAEQTPGQIQLERFEKYGQVRGDFTVVENGEKRRLINVFSTSAYRKEAEKILRKQQEFNNQITDEFIEDYLKILTGKRKYYHGPGNEKSRTDYGRFRTDGTTLDNIFGVLIGKCTFYPNEYRASKSSYTAQEFNLLNDLNNLTVPTETKKLSEEQKKVIVEYAKEAKTLGASTLLKYIVKMIDASVDQISGYRVDVNNKPEMHTFEVYRKMQSLETISVGELSRNVLDELAHILTLNTEREGIEEAINSKLMGVFSQDQVLELVQFRKNNSSLFSKGWHNFSLKLMMELIPELYETSEEQMTILTRLGKQKSKETSKRTKYIDEKELTEEIYNPVVAKSVRQAIKIINEATKKHGIFDNIVIEMARENNEEDAKKDYIKRQKANQDEKNAAMEKAAFQYNGKKELPGNIFNGHKELATKIRLWHQQGEKCLYTGKTIPISDLIHNQYKYEIDHILPLSLSFDDSLSNKVLVHATANQEKGQRTPFQALDSMDDAWSYREFKSYVKDLKSLSNKKKDYLLTEEDISKIEVKQKFIERNLVDTRYSSRVVLNALQDFYKSHQFDTTISVVRGQFTSQLRRKWGLEKSRETYHHHAVDALIIAASSQLRLWKKQNNPLITYKEGQFIDSQTGEIISLTDDEYKELVFKAPYDHFVDTLHSKTFEDGILFSYQVDSKYNRKISDATIYATRKAKLDKDKSEETYVLGKIKDIYSQAGYDAFIKIYNKDKRKFLMYHKDPQTFEKVIEEILRTYPSKERNDKNKEVPCNPFEKYRQENGPIRKYSKKGNGPEIKCLKYYDNKLGNYIDISPDGSDNQVVLQSLKPWRTDVYFNHQTKKYELMGLKYSDLSFEKGSGKYSISNEKYNSIKRIEGVNEQSEFKFTLYK

SEQ ID NO: 771 - protein, 1377 aa, Streptococcus sp.
MNNKPYSIGLDIGTNSVGWSVITDDYKVPSKKMKVLGNTDKRFIKKNLIGALLFDEGTTAEARRLKRTARRRYTRRKNRLRYLQEIFAEEMSKVDSSFFHRLDDSFLIPEDKRGSKYPIFATLVEEKEYHKQFPTIYHLRKQLADSKEKADLRLIYLVLAHMIKYRGHFLYEEAFDIKNNDIQKIFNEFISIYDNTFEGSSLSGQNAQVETIFTDKISKSAKRERVLKLFPDEKSTGLFSEFLKLIVGNQADFKKHFDLEEKAPLQFSKDTYDEDLENLLEQIGDDFADLFVAAKKLYDAILLSGILTVTDPSTKAPLSASMIERYENHQKDLAVLKQFIKTNLPEKYVEVFSDQSKDGYAGYIDGKTTQEAFYKYIKNLLSKFDGADYFLDKIEREVFLRKQRTFDNGSIPHQIHLQEMNTILRRQGEHYPFLKENKEKIEKILTFRIPYHVGPLARGNRDFAWLTRNSDQAIRPWNFEEIVDKASSAEDFINKMTNYDLYLPEEKVLPKHSLLYETFAVYNELTKVKFIAEGMRDYQFLDSGQKKKIINQLFKKKRKVTEDDIIDCLQKIDNYDGIELKGIEKQFNASLSTYHDILKIIRDKEFMDDPKNGDILENVIHTLTIFEDREMIKQRLAQYNSIFDEKVIKALSRKHYTGWGKLSAKLIDGIRDKQTGKTILDYLMDDGKSNRNFMQLIKDDELSFTEIIQKAQVVGDTDNLRQVVQNLPGSPAIKKGILQSIKIVDELVKVMGHAPESIVIEMARENQTTARGKKNSQQRYKRIEDSLKNLASGLDSNILKENPTDNIQLQNDRLFLYYLQNGKDMYTGEALNINQLSSYDIDHIIPQAFIKDDSLDNRVLTSSKDNRGKSDNVPSLEVVEKMKAFWQQLLDSKLISERKYNNLTKAERERGGLNELDKVGFIKRQLVETRQITKHVAQILDARFNKEVTEKNKKNRNVKIITLKSNMVSNFRKEFGLYKVREINDYHHAHDAYLNAVVAKAILKKYPKLEPEFVYGDYQKYDLKRYISRSKDPKEVEKATEKYFFYSNLLNFFKEEVHYADGTIVKRENIEYSKDTGEIAWNKEKDFATIKKVLSLPQVNIVKKTEEQTVGQNGGLFDNNIVSKKKVVDASKLIPIKSGLSPEKYGGYARPTIAYSVLVTYKQNNKIKNTMVGIPVLTKLEFERDPNLYLRNLGINNVSHVIKLVKYTVLEFKHKYGTYRRFIVSNQELKRANQIFVTTKQMKLISQYTTLDKNEHDSLLKNNQQLIQSIWNQFLEFMLATDLVNKKQYDELILTNNQTIEECRNIMNRVITTLSFTNINAGQKKIIFDDTLSLPIKRWQFTDSDKMVKKIIESTLIHQSITGLYETRIDLSKLGED

SEQ ID NO: 772 - protein, 1371 aa, Streptococcus sp.
MNNNNYSIGLDIGTNSVGWAVITDDYKVPSKKMRVLGNTDKRFIKKNLIGALLFDEGTTAEDRRLKRTARRRYTRRKNRLRYLQEIFAEEMSKVDSSFFHRLDDSFLVPEDKSGSKYPIFATLAEEKEYHKKFPTIYHLRKHLADSKEKADLRLIYLALAHITKYRGHFLYEEAFDIKNNDIQKIFNEFINIYDNTFEGSSLSGQNAQVEAIFTGKISKSVKREHVLKLFPDEKSTGLFSEFLKLIVGNQADFKKHFDLEEKASLQFSKDTYDEDLENLLGQIGDDFADLFLVAKKLYDAILLSGILTVTDPSTKAPLSASMIERYENHQEDLAALKQFIKNNLPEKYAEVFSDQSKDGYAGYIDGKTTQEAFYKYIKNLLSKFEGADYFLDKIEREDFLRKQRTFDNGSIPHQIHLQEMNAILRRQGEHYPLLKENKEKIEKILTFRIPYYVGPLARGNRDFAWLTRNSDQAIRPWNFEEIVDKASSAESFINKMTNYDLYLPEEKVLPKHSLLYETFAVYNELTKVKFIAEGLRDYQFFDSGQKKQIVNQLFKEKRKVTEKDIIHYLHNVDGYDGIELKGIEKQFNASLSTYHDLLKIIKDKEFMDNHKNQEILENIVHTLTIFEDREMIKQRLAQYDSIFDEKVIKALTRRHYTGWGKLSAKLINGICDKKTGKTILDYLIDDGYNNRNFMQLINDDGLSFKEIIQKAQVVGKTDDLTQVVRELSGSPAIKKGILQSIKIVDELVKIMGYAPESIVIEMARENQTTAKGKKNSQQRYKRIEDALKNLAPGLDSTISKENPTDNIQLQNDRLFLYYLQNGKDMYTGEALDINQLSSYDIDHIIPQAFIKDDSLDNRVLTSSKDNRGKSDNVPSLEVVKKRKAFWQQLLDSKLISERKFNNLTKAERGGLDERDKVGFIKRQLVETRQITKHVARILDARFNTEVSEKNQKIRSVKIITLKSNLVSNFRKEFKLYKVREINDYHHAHDAYLNAVVAKAILKKYPKLEPEFVYGDYQKYDLKRYISKSKDPKEVEKATEKYFFYSNLLNFFKEEVHYADGTIVKRENIEYSKDTGEIAWNKEKDFVTIKKVLSYPQVNIVKKREVQTGGFSKESILPKGNSDKLIPRKTKDILWDTTKYGGFDSPVIAYSILLIADIEKGKAKKLKTVKTLVGITIMEKAAFEKNPITFLENKGYHNVRKENILCLPKYSLFELENGRRRLLASAKELQKGNEIVLPVYLTTLLYHSKNVHKLDEPEHLEYIQKHRYEFKDLLNLVSEFSQKYVLAEANLEKIKSLYVDNEQADIEILANSFINLLTFTALGAPAAFKFFGKDVDRKRYTTVSEILNATLIHQSITGLYETRIDLSKLGED

SEQ ID NO: 773 - protein, 1139 aa, Streptococcus sp.
MSDLVLGLDIGIGSVGVGILNKVTGEIIHKNSRIFPAAQAENNLERRTNRQGRRLTRRKKHRRVRLNHLFEESGLITDFTKVSINLNPYQLRVKGLTAELSNEELFIALKNMVKHRGISYLDDASDDGNSSVGDYAQIVKENSKQLETKTPGQIQLERYQKYGQLRGDFTVEEDGRKHRLINVFPTSAYHAEALRILQTQQEFNPQITDEFINSYLEILTGKRKYYHGPGNEKSRTDYGKYTTKKDAQGQYITLNNIFGILIGKCTFYPEEYRAAKASYTAQEFNLLNDLNNLTVPTETKKLSEEQKYQIITYVKNEKAMGPAKLFKYIAKLLSCDVADIKGYRIDKSDKAEIHTFEAYRKMKTLETLDVKKMAREELDKLAYVLTLNTEREGIQEALDHEFADGTFSQEQVDELVQFRKANSSIFGKGWHSFSVKLMMELIPELYATSEEQMTILTRLGKQKTTSSSNKTKYIDEKQLTEEIYNPVVAKSVRQAIKIVNAAIKKYGDFDNIVIEMARETNEDDEKKAIQKIQKANKAEKDAAMRKAANQYNGKAELPHSVFHGHKQLATKIRLWHQQGERCLYTGKTISIHDLINNPNQFEIDHILPLSITFDDSLANKVLVYATANQEKGQRTPYQALDSMDDAWSFRELKAFVRESKALSNKKKEYLLTEEDISKFDVRKKFIERNLVDTRYASRVVLNALQEHFRTHKIDTKVSVVRGQFTSQLRRHWGIEKTRDTYHHHAVDALIIAASSQLNLWKKQKNTLVSYSEDQLLDIETGELISDDEYKESVFKAPYQHFVDTLKSKEFEDSILFSYQVDSKFNRKISDATIYATRKAKLDKEKKEYTYTLGKIKDIYALGTKTPSKTGFYKFLDLYKKDKSQFLMYQKDRRTWDEVIEKILEQYRPFKEKDKNGKEVDFNPFEKYRIENGPIRKYSRKGNGPEIKSLKYYDNLLGRFVDITPSESKNPVALLSLNPWRTDVYYNTETRKYEFLGLKYADLCFEKGGSYGISKVKYNKIREKEGIGKNSEFKFTLYKNDLILIKDTETNRQQIFRFWSRTGKDNPKSFEKHKLELKPYEKTRFEKGEELKVLGKVPPSSNRLQKNMQIENLSIYKVRTDVLGNQHIIKNEGDKPKLDF

SEQ ID NO: 774 - protein, 1375 aa, Streptococcus sp.
MSNKSYSIGLDIGTNSVGWAVITDDYKVPSKKMKVLGNTDKHFIKKNLIGALLFDEGTTAEDRRLKRTARRRYTRRKNRLRYLQEIFSQEISKVDSSFFHRLDDFFLVPEDKRGSKYPIFATLVEEKEYHKKFPTIYHLRKHLADSKEKTDLRLIYLALAHMIKYRGHFLYEESFDIKNNDIQKIFSEFISIYDNTFEGKSLSGQNAQVEAIFTDKISKSTKRERVLKLFPDEKSTGLFSEFLKLIVGNQADFKKHFDLEEKAPLQFSKDTYDEDLENLLGQIGDDFADLFLVAKKLYDAILLSGILTVKDLSTKAPLSASMIERYENHQKDLAALKQFIQNNLQEKYDEVFSDQSKDGYAGYIDGKTTQEAFYKYIKNLLSKFEGADYFLDKIEREDFLKKQRTFDNGSIPHQIHLQEMNAIIRRQGEHYPFLQENKEKIEKILTFRIPYYVGPLARGNGDFAWLTRNSDQAIRPWNFEEIVDQASSAEDFINKMTNYDLYLPEEKVLPKHSLLYETFAVYNELTKVKFIAEGLTRYQFLDKKQKKDIFDTFFKAENKRKVTEKDIIHYLHNVDGYDGIELKGIEKQFNASLSTYHDLLKIIKDKAFMDDSKNEEILENIIHTLTIFEDREMIKQRLAQYDSLFDEKVIKALTRRHYTGWGKLSAKLINGIRDKKSGKTILDYLIDDGEINRNFMQLIHDDGLSFKEIIQKAQVFGKTNDVKQVVQELPGSPAIKKGILQSIKIVDELVKVMGHAPESIVIEMARENQTTARGKKNSQQRYKRIEDSLKNLASGLDSNILKENPTDNIQLQNDRLFLYYLQNGRDMYTGKPLEINQLSNYDIDHIIPQAFIKDDSLDNRVLTSSKDNRGKSDNVPSLEVVEKMKAFWQQLLDSKLISERKFNNLTKAERERGGLNELDKVGFIKRQLVETRQITKHVAQFLDARFNKEVTEKDKKNRNVKIITLKSNLVSNFRKEFGLYKVREINDYHHAHDAYLNAVLAKAILKKYPKLEPEFVYGDYQKYDLQRYISKSREPKEVEKATQKYFFYSNLLNFFKEEVHYADGTIVKRENIEYSKDTGEIAWNKEKDFATVKKVLSLPQVNIVKKTEVQTGGFSKESILPKGNSDKLIPRKTKEILWDTTKYGGFDSPVIAYSILLIADIEKGKAKKLKTVKTLVGITIMEKATFEKNPITFLENKGYHNVRKENILCLPKYSLFELESGRRRMLASAKELQKGNEIVLPVYLTTLLYHSKNVHKLDEPEHLEYIQKHRYEFKDLLNLVSEFSQKYVLADANLEKIKNLYADNEQADIEILANSFINLLTFTALGAPAAFKFLGKDVDRKRYTTVSEILNATLIHQSITGLYETRIDLSKLGED

SEQ ID NO: 775 - protein, 206 aa, Streptococcus sp.
RTPFQALDSMDDAWSYREFKSYVKESKLLGNKKKEYLLTEEDISKIEVKQKFIERNLIDTRYSSRVVLNALQDFYKAHKFDTTISVVRGQFTSQLRRKWGLEKSRETYHHHAVDALIIAASSQLRLWKKQNNPLIAYKEGQFVDSETGEIISLSDDEYKELVFKAPYDHFVDTLSSKTFEDSILFSYQVDSKFNRKISDATIYATR

SEQ ID NO: 776 - protein, 1122 aa, Streptococcus suis
MSNGKILGLDIGIASVGVGVIDAQTGEIIHASSRIFPSANAANNAERRTFRGSRRLIRRKKHRIKRLDDLFNDFHINLDGEMSTDNPYVLRVKGLSQKLTVEELYISIKNIMKRRGISYLDDAESDNEAGRSDYAKAIERNRQLLTSKTPGEIQLERLEKYGQLRGNFTIIDEEGQSQQIINVFSTSDYVKEVEKILDCQKMYHKFISDEFCDKLIELLREKRKYYVGPGNEKSRTDYGIYRTDGTTLENLFGILIGKCTFYPDQYRSSRASYTAQEFNFLNDLNNLTVPTETKKLSQEQKEFLVNYAKETSVLGAGKILQQIAKLADCKVEDIRGYRLDNKDKPELHTFETYRAMKGLVPLVDIGVLSREQLDILADILTLNTDFEGIREALKKQLPNVFDEKQVKGLASFRKSKSQLFAKGWHNLSQKIMLEVIPELYATSDEQMTILTRLGKFEKSSVAEYPSSINVDEITDEIYNPVVAKSIRQTIKIINASIKKWDEFDQIVIEMPRDRNEDEEKKRIADGQKANAKEKADSILRAAELYCAGKVLPDYVYNGHNQLATKIRLWYQQGERCIYTGQPISIHDLIHNQNQYEIDHILPLSLTFDDSLSNKVLVLATANQEKAQRTPYNYLKSATSAWSYREFKDYVTKRKGIGKKKCEYLTFEEDINGFEVRSKFIQRNLVDTRYASKVILNALQDYFKISGIQTKVSVVRGQFTSQLRHKWGIEKTRETYHHHAVDALIIAASSQLRLWKKQESPLVVDYQEGRQVDLETGEILELTDEQYKELVYQPPYQGFVNTISSSAFDNEILFSYQVDSKVNRKISDATIYATRNAQLGKDKTEGIYVLGKIKDIYTQAGYEAFLKRYTKDKTSFLMYHKDLDTWEKVIEIILRDYREYDEKGKEIGNPFERYRRENGYVKKYSRKGNGTAIKSLKYYDNKLGNHIDITPENSRNAVVLQSLKPWRTDVYFNKETGKYEFLGIKYSDLSFEKGTGEYGISQEKYDSIKIAEGVAKKSIFKFTLYKQDLLFIKDIENNFGKLLRFTSKNDTSKHYVELKPYDKNKFGTEEPLLPVLGNVAKSGQCIKGLNKSNISIYKVRTDILGYRHFIKQEGEHPQLKFKK

SEQ ID NO: 777 - protein, 1381 aa, Streptococcus suis
MVKKKYAIGIDIGTNSVGWSIVTDDYKVPSKKMKVFGNTEKRYIKKNLLGTLLFDEGNTAENRRLKRTARRRYTRRRNRILYLQEIFAEEINKIDDSFFQRLDDSFLIVEDKQGSKHPIFGTLQEEKEYHKQFPTIYHLRKQLADSSQKADIRLIYLALAHIIKYRGHFLFEGDLKSENKDVQHLFNDFVEMFDKTVEGSYLSENLPNVADVLVEKVSKSRRLENILHYFPNEKKNGLFGNFLALALGLQPNFKTNFELAEDAKIQFSKETYEEDLEELLGKIGDDYADLFIATKSLYDGILLAGILSTTDSTTKAPLSSSMVNRYEEHQKDLALLKNFIHQNLSDSYKEVFNDKLKDGYAGYIEGKTTQENFYRFIKKAIEKIEGSNYFIDKIDREDFLRKQRTFDNGSIPHQIHLQEMHAIIRRQAEFYPFLVENQDKIEKILTFRIPYYVGPLARGKSEFAWLNRKSDEKIRPWNFDEMVDKETSAENFITRMTNYDRYLPDQKVLPKHSLLYEKFAVYNELTKVKFIAEGMRDYQFLDSGQKKDIVKTLFKTKRKVTAKDIKAYLENSNGYAGVELKGLEEQFNASLPTYHDLLKILRDKAFIDAEENQEILEDIVLTLTLFEDREMIRKRLEKYKDILTEEQRKKLERRHYTGWGRLSAKLINGILDKVTRKTILGYLIDDGTSNRNFMQLINDDTLSFVDEIRLAQGSGEAEDYRAEVQNLAGSPAIKKGILQSLKIVDELIEVMGYEPEHIVVEMARENQFTNQGRRNSQQRINRLENALKDFGSKILEEQKPYGVSKVNNIHLQSDRLFLYYLQNGKDMYTDEELDIDHLSEYDIDHIIPQAFIKDDSLDNKVLTKSAKNRGKSDDVPSMEIVHNRKNFWRQLLKSKLISQRKFDNLTKAERGGLTNEDKARFIQRQLVETRQITKHVARMLDTRFNTKLDEAGNRIRDPKVNIITLKSNLVSQFRKDYQLYKIREINNYHHAHDAYINAVVATALLKKYPQLAPEFVYGEYPTYNSYNSRKSATEKVLFYSNIMNFFKRIVVHSKTGEVRIRPVIEVNKETGEIVWDKKSDFRTVRKVLSYPQVNVVKKTEVQNHGLDRGKPKGFYNANLSPRPKEGSVENLVPAKQSFDTKRYGGYAGISNSYAVLVNGIIEKGKKKSKAEVTEFQGISILARKDFDKNPKQYLLNLGYKDIKSIIKLPKYSLFELENGSRRMLASILSTNNKRGEIHKGNEMYLPDKFVTLLYHAMRVNRTLEPGHKKYVETHRHVFDELLIYILEYNEKIVGAKANGKRIVEAYSARKDTDNLEELCNSFINLLNLTALGSAVDFEFLGTKIPRYRDYTPSSLLKATLIHQSVTGLYETRIDLSKLGGD

SEQ ID NO: 778 - protein, 39 aa, Streptococcus thermophilus
GRCIKGLGKSNISIYKVRTDVLGNQHIIKNEGDKPKLDF

SEQ ID NO: 779 - protein, 302 aa, Streptococcus thermophilus
MIRRKKHRIVRLNRLFEESGLITDFTKISINLNPYQLRVKGLTDELSNEELFIALKNMVKHRGISYLDDASDDGNSSVGDYAQIVKENSKQLETKTPGQIQLERYQTYGQLRGDFTVEKDGKKHRLINVFPTSAYRSEALRILQTQQEFNPQITDEFINRYLEILTGKRKYYHGPGNEKSRTDYGRYRTSGETLDNIFGILIGKCTFYPDEFRAAKASYTAQEFNLLNDLNNLTVPTETKKLSKEQKNQIINYVKNEKAMGPAKLFKYIAKLLSCDVADIKGYRIDKSGKAERFILSKPIEK

SEQ ID NO: 780 - protein, 1121 aa, Streptococcus thermophilus
MSDLVLGLDIGIGSVGVGILNKVTGEIIHKNSRIFPAAQAENNLVRRTNRQGRRLTRRKKHRIVRLNRLFEESGLITDFTKISINLNPYQLRVKGLTDELSNEELFIALKNMVKHRGISYLDDASDDGNSSVGDYAQIVKENSKQLETKTPGQIQLERYQTYGQLRGDFTVEKDGKKHRLINVFPTSAYRSEALRILQTQQEFNPQITDEFINRYLEILTGKRKYYHGPGNEKSRTDYGRYRTSGETLDNIFGILIGKCTFYPDEFRAAKASYTAQEFNLLNDLNNLTVPTETKKLSKEQKNQIINYVKNEKAMGPAKLFKYIAKLLSCDVADIKGYRIDKSGKAEIHTFEAYRKMKTLETLDIEQMDRETLDKLAYVLTLNTEREGIQEALEHEFADGSFSQKQVDELVQFRKANSSIFGKGWHNFSVKLMMELIPELYETSEEQMTILTRLGKQKTTSSSNKTKYIDEKLLTEEIYNPVVAKSVRQAIKIVNAAIKEYGDFDNIVIEMARETNEDDEKKAIQKIQKANKDEKDAAMLKAANQYNGKAELPHSVFHGHKQLATKIRLWHQQGERCLYTGKTISIHDLINNSNQFEVDHILPLSITFDDSLANKVLVYATANQEKGQRTPYQALDSMDDAWSFRELKAFVRESKTLSNKKKEYLLTEEDISKFDVRKKFIERNLVDTRYASRVVLNALQEHFRAHKIDTKVSVVRGQFTSQLRRHWGIEKTRDTYHHHAVDALIIAASSQLNLWKKQKNTLVSYSEDQLLDIETGELISDDEYKESVFKAPYQHFVDTLKSKEFEDSILFSYQVDSKFNRKISDATIYATRQAKVGKDKADETYVLGKIKDIYTQDGYDAFMKIYKKDKSKFLMYRHDPQTFEKVIEPILENYPNKQMNEKGKEVPCNPFLKYKEEHGYIRKYSKKGNGPEIKSLKYYDSKLGNHIDITPKDSNNKVVLQSVSPWRADIYFNNTTGKYEILGLKYADLQFEKGTGTYKISQEKYNDIKKKEGVDSDSEFKFTLYKNDLLLVKETETKEQQLFRFLSRTMPKQKHYVELKPYDKQKFEGGEALIKVLGNVANGGQCIKGLGKSNISIYKVRTDVLGNQHIIKNEGDKPKLDF

SEQ ID NO: 781 - protein, 1121 aa, Streptococcus thermophilus
MSDLVLGLDIGIGSVGVGILNKVTGEIIHKNSRIFPAAQAENNLVRRTNRQGRRLTRRKKHRIVRLNRLFEESGLITDFTKISINLNPYQLRVKGLTDELSNEELFIALKNMVKHRGISYLDDASDDGNSSVGDYAQIVKENSKQLETKTPGQIQLERYQTYGQLRGDFTVEKDGKKHRLINVFPTSAYRSEALRILQTQQEFNPQITDEFINRYLEILTGKRKYYHGPGNEKSRTDYGRYRTSGETLDNIFGILIGKCTFYPDEFRAAKASYTAQEFNLLNDLNNLTVPTETKKLSKEQKNQIINYVKNEKAMGPAKLFKYIAKLLSCDVADIKEYRIDKSGKAEIHTFEAYRKMKTLETLDIEQMDRETLDKLAYVLTLNTEREGIQEALEHEFADGSFSQKQVDELVQFRKANSSIFGKGWHNFSVKLMMELIPELYETSEEQMTILTRLGKQKTTSSSNKTKYIDEKLLTEEIYNPVVAKSVRQAIKIVNAAIKEYGDFDNIVIEMARETNEDDEKKAIQKIQKANKDEKDAAMLKAANQYNGKAELPHSVFHGHKQLATKIRLWHQQGERCLYTGKTISIHDLINNSNQFEVDHILPLSITFDDSLANKVLVYATANQEKGQRTPYQALDSMDDAWSFRELKAFVRESKTLSNKKKEYLLTEEDISKFDVRKKFIERNLVDTRYASRVVLNALQEHFRAHKIDTKVSVVRGQFTSQLRRHWGIEKTRDTYHHHAVDALIIAASIQLNLWKKQKNTLVSYSEDQLLDIETGELISDDEYKESVFKAPYQHFVDTLKSKEFEDSILFSYQVDSKFNRKISDATIYATRQAKVGKDKADETYVLGKIKDIYTQDGYDAFMKIYKKDKSKFLMYRHDPQTFEKVIEPILENYPNKQINEKGKEVPVNPFLKYKEEHGYIRKYSKKGNGPEIKSLKYYDSKLGNHIDITPKDSNNKVVLQSVSPWRADVYFNKTTGKYEILGLKYADLQFEKGTGTYKISQEKYNDIKKKEGVDSDSEFKFTLYKNDLLLVKDTETKEQQLFRFLSRTMPKQKHYVELKPYDKQKFEGGEALIKVLGNVANSGQCKKGLGKSNISIYKVRTDVLGNQHIIKNEGDKPKLDF

SEQ ID NO: 782 - protein, 1121 aa, Streptococcus thermophilus
MSDLVLGLDIGIGSVGVGILNKVTGEIIHKNSRIFPAAQAENNLVRRTNRQGRRLTRRKKHRRVRLNRLFEESGLITDFTKISINLNPYQLRVKGLTDELSNEELFIALKNMVKHRGISYLDDASDDGNSSVGDYAQIVKENSKQLETKTPGQIQLERYQTYGQLRGDFTVEKDGKKHRLINVFPTSAYRSEALRILQTQQEFNPQITDEFVNRYLEILTGKRKYYHGPGNEKSRTDYGRYRTNGETLDNIFGILIGKCTFYPEEFRAAKASYTAQEFNLLNDLNNLTVPTETKKLSKEQKNQIINYVKNEKAMGPAKLFKYIAKLLSCDVADIKGYRIDKSGKAEIHTFEAYRKMKTLETLDIEQMDRETLDKLAYVLTLNTEREGIQEALEHEFADGSFSQKQVDELVQFRKANSSIFGKGWHNFSVKLMMELIPELYETSEEQMTILKRLGKQKTTSSSNKTKYIDEKLLTEEIYNPVVAKSIRQAIKIVNAAIKEYGDFDNIVIEMARETNEDDEKKAIQKIQKANKDEKDAAMLKAANQYNGKAELPHSVFHGHKQLATKIRLWHQQGERCLYTGKTISIHDLINNPNQFEVDHILPLSITFDDSLANKVLVYATANQEKGQRTPYQALDSMDDAWSFRELKAFVRESKTLSNKKKEYLLTEEDISKFDVRKKFIERNLVDTRYASRVVLNALQEHFRAHKIDTKVSVVRGQFTSQLRRHWGIEKTRDTYHHHAVDALIIAASSQLNLWKKQKNTLVSYSEDQLLDIETGELISDDEYKESVFKAPYQHFVDTLKSKEFEDSILFSYQVDSKFNRKISDATIYATRQAKVGKDKKDETYVLGKIKDIYTQDGYDAFMKIYKKDKSKFLMYRHDPQTFEKVIEPILENYPNKEMNEKGKEVPCNPFLKYKEEHGYIRKYSKKGNDPEIKSLKYYDSKLGNHIDITPKDSNNKVVLQSVSPWRADVYFNKTTGKYEILGLKYADLQFEKGTGTYKISQEKYNDIKKKEGVDSDSEFKFTLYKNDLLLVKDTETKEQQLFRFLSRTMPKQKHYVELKPYDKQKFEGGEALIKVLGNVANSGQCKKGLGKSNISIYKVRTDVLGNQHIIKNEGDKPKLDF

SEQ ID NO: 783 - protein, 1122 aa, Streptococcus thermophilus
MSDLVLGLDIGIGSVGVGILNKVTGEIIHKNSRIFPAAQAENNVERRTNRQGRRLTRRKKHRRVRLNRLFEESGLITDFTKISINLNPYQLRVRGLTDELSNEELFIALKNMVKHRGISYLDDASDDGNSSVGDYAQIVKENSKQLETKTPGQIQLERYQTYGQLRGDFTVEKDGKKHRLINVFPTSAYRSEALRILQTQQEFNSQITDEFINRYLEILTGKRKYYHGPGNEKSRTDYGRYRTSGETLDNIFGILIGKCTFYPEEFRAAKASYTAQEFNLLNDLNNLTVPTETKKLSKEQKNQIINYVKNEKAMGPAKLFKYIAKLLSCDVADIKGYRIDKSGKAEIHTFEAYRKMKTLETLDIEQMDRETLDKLAYVLTLNTEREGIQEALEHEFADGSFSQKQVDELVQFRKASSSIFGKGWHNFSVKLMMELIPELYETSEEQMTILTRLGKQKTTSSSNKTKYIDEKLLTEEIYNPVVAKSVRQAIKIVNAAIKEYGDFDNIVIEMARETNEDDEKKAIQKIQKANKDEKDAAMLKAANQYNGKAELPHSVFHGHKQLATKIRLWHQQGERCLYTGKTISIHDLINNPNQFEVDHILPLSITFDDSLANKVLVYATANQEKGQRTPYQALDSMDDAWSFRELKAFVRESKTLSNKKKEYLLTEEDISKFDVRKKFIERNLVDTRYASRVVLNALQEHFRAHKIDTKVSVVRGQFTSQLRRHWGIEKTRDTYHHHAVDALIIAASSQLNLWKKQKNTLVSYSEDQLLDIETGELISDDEYKESVFKAPYQHFVDTLKSKEFEDSILFSYQVDSKFNRKLSDATIYATRQAKVGKDKKDETYVLGKIKDIYTQDGYDAFMKIYKKDKSKFLMYRHDPQTFEKVIEPILENYPNKEMNEKGKEVPCNPFLKYKEEHGYIRKYSKKGNGPEIKSLKYYDSKLLGNPIDITPENSKNKVVLQSLKPWRADVYFNKTTGKYEILGLKYADLQFEKKTGTYKISQEKYNGIMKEEGVDSDSEFKFTLYKNDLLLVKDTETKEQQLFRFLSRTMPNVKYYVELKPYSKDKFEKNESLIEILGSADKSGRCIKGLGKSNISIYKVRTDVLGNQHIIKNEGDKPKLDF

SEQ ID NO: 784 - protein, 1388 aa, Streptococcus thermophilus
MTKPYSIGLDIGTNSVGWAVITDNYKVPSKKMKVLGNTSKKYIKKNLLGVLLFDSGITAEGRRLKRTARRRYTRRRNRILYLQEIFSTEMATLDDAFFQRLDDSFLVPDDKRDSKYPIFGNLVEEKAYHDEFPTIYHLRKYLADSTKKADLRLVYLALAHMIKYRGHFLIEGEFNSKNNDIQKNFQDFLDTYNAIFESDLSLENSKQLEEIVKDKISKLEKKDRILKLFPGEKNSGIFSEFLKLIVGNQADFRKCFNLDEKASLHFSKESYDEDLETLLGYIGDDYSDVFLKAKKLYDAILLSGFLTVTDNETEAPLSSAMIKRYNEHKEDLALLKEYIRNISLKTYNEVFKDDTKNGYAGYIDGKTNQEDFYVYLKNLLAEFEGADYFLEKIDREDFLRKQRTFDNGSIPYQIHLQEMRAILDKQAKFYPFLAKNKERIEKILTFRIPYYVGPLARGNSDFAWSIRKRNEKITPWNFEDVIDKESSAEAFINRMTSFDLYLPEEKVLPKHSLLYETFNVYNELTKVRFIAESMRDYQFLDSKQKKDIVRLYFKDKRKVTDKDIIEYLHAIYGYDGIELKGIEKQFNSSLSTYHDLLNIINDKEFLDDSSNEAIIEEIIHTLTIFEDREMIKQRLSKFENIFDKSVLKKLSRRHYTGWGKLSAKLINGIRDEKSGNTILDYLIDDGISNRNFMQLIHDDALSFKKKIQKAQIIGDEDKGNIKEVVKSLPGSPAIKKGILQSIKIVDELVKVMGGRKPESIVVEMARENQYTNQGKSNSQQRLKRLEKSLKELGSKILKENIPAKLSKIDNNALQNDRLYLYYLQNGKDMYTGDDLDIDRLSNYDIDHIIPQAFLKDNSIDNKVLVSSASNRGKSDDFPSLEVVKKRKTFWYQLLKSKLISQRKFDNLTKAERGGLLPEDKAGFIQRQLVETRQITKHVARLLDEKFNNKKDENNRAVRTVKIITLKSTLVSQFRKDFELYKVCEINDFHHAHDAYLNAVIASALLKKYPKLEPEFVYGDYPKYNSFRERKSATEKVYFYSNIMNIFKKSISLADGRVIERPLIEVNEETGESVWNKESDLATVRRVLSYPQVNVVKKVEEQNHGLDRGKPKGLFNANLSSKPKPNSNENLVGAKEYLDPKKYGGYAGISNSFAVLVKGTIEKGAKKKITNVLEFQGISILDRINYRKDKLNFLLEKGYKDIELIIELPKYSLFELSDGSRRMLASILSTNNKRGEIHKGNQIFLSQKFVKLLYHAKRISNTINENHRKYVENHKKEFEELFYYILEFNENYVGAKKNGKLLNSAFQSWQNHSIDELCSSFIGPTGSERKGLFELTSRGSAADFEFLGVKIPRYRDYTPSSLLKDATLIHQSVTGLYETRIDLAKLGEG

SEQ ID NO: 785 - protein, 1388 aa, Streptococcus thermophilus
MTKPYSIGLDIGTNSVGWAVITDNYKVPSKKMKVLGNTSKKYIKKNLLGVLLFDSGITAEGRRLKRTARRRYTRRRNRILYLQEIFSTEMATLDDAFFQRLDDSFLVPDDKRDSKYPIFGNLVEEKAYHDEFPTIYHLRKYLADSTKKADLRLVYLALAHMIKYRGHFLIEGEFNSKNNDIQKNFQDFLDTYNAIFESDLSLENSKQLEEIVKDKISKLEKKDRILKLFPGEKNSGIFSEFLKLIVGNQADFRKCFNLDEKASLHFSKESYDEDLETLLGYIGDDYSDVFLKAKKLYDAILLSGFLTVTDNETEAPLSSAMIKRYNEHKEDLALLKEYIRNISLKTYNEVFKDDTKNGYAGYIDGKTNQEDFYVYLKNLLAEFEGADYFLEKIDREDFLRKQRTFDNGSIPYQIHLQEMRAILDKQAKFYPFLAKNKERIEKILTFRIPYYVGPLARGNSDFAWSIRKRNEKITPWNFEDVIDKESSAEAFINRMTSFDLYLPEEKVLPKHSLLYETFNVYNELTKVRFIAESMRDYQFLDSKQKKDIVRLYFKDKRKVTDKDIIEYLHAIYGYDGIELKGIEKQFNSSLSTYHDLLNIINDKEFLDDSSNEAIIEEIIHTLTIFEDREMIKQRLSKFENIFDKSVLKKLSRRHYTGWGKLSAKLINGIRDEKSGNTILDYLIDDGISNRNFMQLIHDDALSFKKKIQKAQIIGDEDKGNIKEVVKSLPGSPAIKKGILQSIKIVDELVKVMGGRKPESIVVEMARENQYTNQGKSNSQQRLKRLEKSLKELGSKILKENIPAKLSKIDNNALQNDRLYLYYLQNGKDMYTGDDLDIDRLSNYDIDHIIPQAFLKDNSIDNKVLVSSASNRGKSDDFPSLEVVKKRKTFWYQLLKSKLISQRKFDNLTKAERGGLLPEDKAGFIQRQLVETRQITKHVARLLDEKFNNKKDENNRAVRTVKIITLKSTLVSQFRKDFELYKVREINDFHHAHDAYLNAVIASALLKKYPKLEPEFVYGDYPKYNSFRERKSATEKVYFYSNIMNIFKKSISLADGRVIERPLIEVNEETGESVWNKESDLATVRRVLSYPQVNVVKKVEEQNHGLDRGKPKGLFNANLSSKPKPNSNENLVGAKEYLDPKKYGGYAGISNSFAVLVKGTIEKGAKKKITNVLEFQGISILDRINYRKDKLNFLLEKGYKDIELIIELPKYSLFELSDGSRRMLASILSTNNKRGEIHKGNQIFLSQKFVKLLYHAKRISNTINENHRKYVENHKKEFEELFYYILEFNENYVGAKKNGKLLNSAFQSWQNHSIDELCSSFIGPTGSERKGLFELTSRGSAADFEFLGVKIPRYRDYTPSSLLKDATLIHQSVTGLYETRIDLAKLGEG

SEQ ID NO: 786 - protein, 595 aa, Streptococcus thermophilus
MVQFRKANSSIFGKGWHNFSVKLMMELIPELYETSEEQMTILKRLGKQKTTSSSNKTKYIDEKLLTEEIYNPVVAKSVRQAIKIVNAAIKEYGDFDNIVIEMARETNEDDEKKAIQKIQKANKDEKDAAMLKAANQYNGKAELPHSVFHGHKQLATKIRLWHQQGERCLYTGKTISIHDLINNPNQFEVDHILPLSITFDDSLANKVLVYATANQEKGQRTPYQALDSMDDAWSFRELKAFVRESKTLSNKKKEYLLTEEDISKFDVRKKFIERNLVDTRYASRVVLNALQEHFRAHKIDTKVSVVRGQFTSQLRRHWGIEKTRDTYHHHAVDALIIAASSQLNLWKKQKNTLVSYSEDQFLDIETGELISDDEYKESVFKAPYQHFVDTLKSKEFEDSILFSYQVDSKFNRKISDATIYATRKAKLDKEKKEYTYTLGKIKDIYTQAGYDAFIKIYKKDKSKFLMYHHDPQTFEKVIEPILENYPNKEINEKGKEVPCNPFLKYKEEHGYIRKYSKKGNGPEIKSFKYYDNLLGRHIDITPKNSKNIVALRKLNPWRTDVYFNHETMKYEFLGLKYADISYKKSKNKAGDFLPK

SEQ ID NO: 787 - protein, 1388 aa, Streptococcus thermophilus]
MTKPYSIGLDIGTNSVGWAVITDNYKVPSKKMKVLGNTSKKYIKKNLLGVLLFDSGITAEGRRLKRTARRRYTRRRNRILYLQEIFSTEMATLDDAFFQRLDDSFLVPDDKRDSKYPIFGNLVEEKVYHDEFPTIYHLRKYLADSTKKADLRLVYLALAHMIKYRGHFLIEGEFNSKNNDIQKNFQDFLDTYNAIFESDLSLENSKQLEEIVKDKISKLEKKDRILKLFPGEKNSGIFSEFLKLIVGNQADFRKCFNLDEKASLHFSKESYDEDLETLLGYIGDDYSDVFLKAKKLYDAILLSGFLTVTDNETEAPLSSAMIKRYNEHKEDLALLKEYIRNISLKTYNEVFKDDTKNGYAGYIDGKTNQEDFYVYLKNLLAEFEGADYFLEKIDREDFLRKQRTFDNGSIPYQIHLQEMRAILDKQAKFYPFLAKNKERIEKILTFRIPYYVGPLARGNSDFAWSIRKRNEKITPWNFEDVIDKESSAEAFINRMTSFDLYLPEEKVLPKHSLLYETFNVYNELTKVRFIAESMRDYQFLDSKQKKDIVRLYFKDKRKVTDKDIIEYLHAIYGYDGIELKGIEKQFNSSLSTYHDLLNIINDKEFLDDSSNEAIIEEIIHTLTIFEDREMIKQRLSKFENIFDKSVLKKLSRRHYTGWGKLSAKLINGIRDEKSGNTILDYLIDDGISNRNFMQLIHDDALSFKKKIQKAQIIGDEDKGNIKEVVKSLPGSPAIKKGILQSIKIVDELVKVMGGRKPESIVVEMARENQYTNQGKSNSQQRLKRLEKSLKELGSKILKENIPAKLSKIDNNALQNDRLYLYYLQNGKDMYTGDDLDIDRLSNYDIDHIIPQAFLKDNSIDNKVLVSSASNRGKSDDFPSLEVVKKRKTFWYQLLKSKLISQRKFDNLTKAERGGLLPEDKAGFIQRQLVETRQITKHVARLLDEKFNNKKDENNRAVRTVKIITLKSTLVSQFRKDFELYKVREINDFHHAHDAYLNAVIASALLKKYPKLEPEFVYGDYPKYNSFRERKSATEKVYFYSNIMNIFKKSISLADGRVIERPLIEVNEETGESVWNKESDLATVRRVLSYPQVNVVKKVEEQNHGLDRGKPKGLFNANLSSKPKPNSNENLVGAKEYLDPKKYGGYAGISNSFAVLVKGTIEKGAKKKITNVLEFQGISILDRINYRKDKLNFLLEKGYKDIELIIELPKYSLFELSDGSRRMLASILSTNNKRGEIHKGNQIFLSQKFVKLLYHAKRISNTINENHRKYVENHKKEFEELFYYILEFNENYVGAKKNGKLLNSAFQSWQNHSIDELCSSFIGPTGSERKGLFELTSRGSAADFEFLGVKIPRYRDYTPSSLLKDATLIHQSVTGLYETRIDLAKLGEG

SEQ ID NO: 788 - protein, 1038 aa, Streptococcus vestibularis
MIDELSNEELFIALKNMVKHRGISYLDDASDDGNSSVGDYAQIVKENSKQLETKTPGQIQLERYQKYGQLRGDFTVEEDGKKHRLINVFPTSAYRAEALRILQTQQEFNSQITDEFINRYLEILTGKRKYYHGPGNEKSRTDYGRYRTSGETLDNIFGILIGKCTFYPEEFRAAKASYTAQEFNLLNDLNNLTVPTETKKLSEEQKNQIINYVKNEKAMGPAKLFKYIAKLLSCDIADIKGYRIDKSDKAEIHTFEAYRKMKTLETIDIEKMSREELDKLAYVLTLNTEREGIQEALEHEFVDGNFSQEQIDELVQFRKANSSIFGKGWHNFSVKLMMELIPELYATSEEQMTILTRLGKQKTTSSSNKTKYIDEKLLTEEIYNPVVAKSVRQAIKIVNAAIKEYGDFDNIVIEMARATNEDDEKKAIQKIQKANKDEKDAAMLKAANQYNGKAELPHSVFHGHKQLATKIRLWHQQGERCLYTGKTISIHDLINNPNQFEIDHILPLSITFDDSLANKVLVYATANQEKGQRTPYQALDSMDDAWSFRELKAFVRESKTLSNKKKEYLLTEEDISKFDVRKKFIERNLVDTRYASRVVLNALQEHFRAHKIDTKVSVVRGQFTSQLRRHWGIEKTRDTYHHHAVDALIIAASSQLNLWKKQKNTLVNYSENQLLDIETGELISDDEYKESVFKAPYQHFVDTLKSKEFEDSILFSYQVDSKFNRKISDATIYATRKAKLDKEKKEYTYTLGKIKDIYALGTKTPSKTGFYKFLDLYKKNKSQFLMYQKDRKTWDEVIEKILEQYRPFKEKDKNGKEVDFNPFEKYRIENGPIRKYSRKGNGPEIKSLKYYDNLLGRFVDITPSESKNPVALLSLNPWRTDVYYNTETRKYEFLGLKYADLCFEKGGSYGISKVKYNKIREKEGIGKNSEFKFTLYKNDLILIKDTETNRQQVFRFWSRTGKDNPKRFEKHKIELKPYEKARFEKGEELEVLGKVPPSSNQLQKNMQIENLSIFKVRTDVLGNQHIIKNEGDKPKLDF

SEQ ID NO: 789 - protein, 97 aa, Streptococcus vestibularis
MSDLVLGLDIGIGSVGVGILNKVTGEIIHKNSRIFPAAQAENNVERRTNRQGRRLTRRKKHRRVRLNHLFEESGLITDFTKVSINLNPYQLRVKIDR

SEQ ID NO: 790 - protein, 1084 aa, Subdoligranulum sp.
MKNTLYGIGLDIGVASVGWAVVGLNGTGEPVGLHRLGVRIFDKAEQPKTGESLAAPRRMARGMRRRLRRKALRRADVYALLERSGLSTREELAQMFEAGGLEDIYALRTRALDEPVGKAEFSRILLHLAQRRGFKSNRRTASDGEDGRLLAAVNENRRRMAQGGWRTVGEMLYRHEAFALHKRNKADDYLSTVGRDMVAEEASILFERQRAMGCSWAAPELQAEYLSILLRQRSFDEGPGGNSPYGGNQVEKMVGRCTFEPDEPRAAKAAYSFEYFSLLQKLNHIRLAENGETRPLTQPQRQQLLSLAHKTPDISLARIRKELALPETVQFNGVRCRANETLEESEKKEKFACLPAYHKMRKALDGVVKGRISSLSISQRDAAATALSLYKNEDTLRAKLTEAGFQAPEIDALAGLTGFSKFGHLSLKACRKLIPHLEQGLTYDQACTAAGYDFKGHGAGERAFTLPAAAPEMEQITSPVVRRAVAQTIKVVNGIIREMDASPAWVRIELARELSKTFGERQEMDRSMRENAAQNERLMQELRDTFHLLSPTGQDLVKYRLWKEQDGVCAYSLRRLDVERLFEPGYVDVDHIVPYSLSFDDRRSNKVLVLSSENRQKGNRLPLQYLQGKRREDFIVWTNSSVHDYRKRQNLLREKLSGDEAEGFRQRNLQDTQHMARFLYNYISDHLAFAQSEALGKKRVFAVSGAVTSHLRKRWGLSKVRADGDLHHALDAAVVACTTDGMIRRISGYYGHIEGEYLQDADGAGSQHARTKERFPAPWPRFRDELIVRLSEQPAEPLLDINPEFYCEYGTEHIRPVFVSRMPRRKVTGPGHKETIKGAAAADEGLLTVRKALTELKLDKDGEIKDYYMPSSDTLLYEALKAQLRRFGGDGKKAFAEPFYKPKADGTPGPLVRKVKTTEKATLTVPVHGGAASNDTMVRVDVFLVPGDGYYWVPVYTADTLKPELPNRAVVQGKPYSEWKEMREEDFIFSLYPNDLVYVEHKSGLKFTLQNADSTLEKTRTQTSAFAYFVSGSISTASITIRTHDNAYGIPSLGVKTLKTFHKYQVDVLGNVFPVHKETRQKFR

SEQ ID NO: 791 - protein, 951 aa, Sutterella parvirubra
MPTVRPVFHSSASFDLGAKNTGLFLVNHPAGAAPSAEYAAAYTIVQPADGDGLNYSTTNRRAVRHRLRGGKRFKLARRLVLQVIDALRKLKPGLIRDEEMRRTVEALSSLLKRRGFTRIESEAQVDPTTLDSVDPAVFADHETLGGFFSLGIPISTQWDALSQNPGAVEQLFKALPSAKDFGKYVTEQFPEFAEQKKLYADAIKVLSSEAKSIVMQLGLGHHHRSKYFEMIAHDMLRDPRLQGVFELFGSEERFKTFICNVSNLQLRALRWYFDEPNPEVANQWNPEKFQVVWLRGLKYFHPDAERKADMKKLIDELTASKDILDALCTTDPRRTIPPYEDQNNRRPPFDQTLWLSAAELTRRYGDKWRIWSQKFERADRALSTGLDEILLYTDRRSRMFNRNQDPSVYADSYVLQRVLDRSSKLDRYALRALAAGYRTQELHEPLATLSDTLGTQHVETFLTFAAEYYEEVAAAKNGLWLDGPSRLLERADIHPPMKKKVLDLLLGNILDATPEIGRILRTVLWNRHVHEKSRSTPASLCRSIEAIRKDFGGEFRMRYDALDAKIRAAEDQKKKFKPTNAEEKDLFKAWNATKTMHAFLRDVLQLTPKQLERTASPYVFAQLHTLIDTERDGFTSTSLAAHLENHWRMRANAAGMAQCSRLPADAVRPFDGVLSKALDRQAFEAAKLAAQHLMSRKELTDTDIRYSIIIESNRFAFSASTAELKKNTLAKKNAEKGLNFELKRWQDKDSRIREASRGICAYTGAKLGDVVEYDHIIPRAFTTSAMGSVFNSEANLICVSRPGNQTKADKRYGLNKLHKTYLTAVFGTADVTTIAASIEDIVGKLASANRLRHFELLNEKEQDAVRHALFLDDESDARRIVLRELAAQNKSRVNGTQAWFVRAFMTKLLEITKDWRERTGNTLDIRSWKTDAEVASRLRSALNFHAEITLT

SEQ ID NO: 792 - protein, 406 aa, Sutterella parvirubra
SNLFREEVPYGDHFLPIIQMKNRIYIGYQLPKADGTGGNAVAVLGKDPLELLETLKPFLDREPQAFSDHPVTYKMINERAYELLTKCALTPDQTTELERTQAEVLRSLNYQTSRAAVLGRLVDDKNKFVAKDAVWKEKDFVISFKLSPKKSAFKASGQLELPAKSDWKALVDSPELAINWGQPADDTFSQRIERKVRMNSSHLEHTPKKRVVSLPVVDKPSGGFRIRRHNLDGSAVFQVHTVANNKYGGFSADSAGKVDWSTPVLCGHLQHANLVPLDPETASAEQLVRMSEWRVVETTSDIRLEVCPGTSGRRYVRVELPFTLLQEWLTAGKVADVPVSPLHLPGSIKLTDPKTFCAEAQKTLSIFAQPRATIFFEQLGDRVRFRFEASGGPATMNAAYNAAGRS

SEQ ID NO: 793 - protein, 389 aa, Sutterella wadsworthensis
MKACDLEEKTNHLQACVAIDLGARYTGTFSILHKSSHLPSKDDCRAATYVLPEDGGKMTYSQRNRTAVRHRIRGKKRFALARRMAMLIIREKLAAKSVTLTSSETRRLAEAVGSLLRRRGYNRLETETDNDLTVLENIEPEVFSEHEILGKYFYAGTDLAIQWETLSQDLSKISSLLAERLSEKDFKKYLTGLIPDDKNKIKHIISVFKMLIDEAESINMQCVLGHKHRTQYLSDIHADMHRDTRLSKAAEAFGGVDRLWRLLGNLSNLQLRAHRWYFNAPHLFDDQALEPARLQKTLVRAFKYLHCPQGVESRAQAELVKELEEADDIIDALCTIDPVRTIPPYENQQNRRPPFDQTLYLSPDLGVSGFLCLGRLFQGQPNEAALCFL

SEQ ID NO: 794 - protein, 976 aa, Tannerella sp.
MKKILGLDLGSNSIGWALVNEAENRDEASSIIKLGVRVNPLTVDEMQNFEKGKSITTNADRTLKRSMRRNLQRYKLRRDALIKLLKKVGFITDGTILSEQGNRTTFETYRLRAKAPDEEISLQELARVLLMINKKRGYKSSRKIKEKEAGTLIDGMEVAKKLYDEDLTPGQLCLQLLESGKKSLPDFYSSDLQEEFDRIWNFQKQFNPKAFCDTAKEEIKGKNKSQTWAILAKYFIWMEEMDVWNEKESKTERVEKECKLVGLKRTVKKEEQRKENYCWRVQALTEQLDLEKVAVVLQEINGQISTSSGYLGAISDRSKVLYFNRQTVGQYQMAELEKNPNTSLRNMVFYRQDYLDEFDKIWEKQAEFHKELTVELKKEIRDIIIFYQRRLKSQKGLIGFCEFENREIMVEKNGKMQAKVVGCKVIPRSHPLFQEFKIWQTLNNVEVFAGEKKCKRKRTDAFPGLFDGTEDTLMVEGWRYLYQEEKEILAKELSVKKSLKKEYILKLLFDNPQDLDMNFEQIEGNDTGNVLFSAYSKMIEKYGYEPLDFGKPTDKIIEQLQVIFADLGWNTDLLFVDLNKEGKDLEKQPYFKLWHLLYSFEGDNTPTGNGKLVEKLMELCHVGKECALELVNISFQNDYGSLSAKAIKKILPYLKEGNRYDVACGYAGYRHSKSSLTKEEIENKVLKDKLDILPKNSLRNPVVEKILNQMVNVINAIIDTYGKPDEIRVELARELKKSAKEREELTKAIAKSTREHEEIRKVLQEEFGMINVSRNDIIRYKLYKELKDNGYKTLYSNQDIPKEKVFSKEIDIEHIIPQARLFDDSLSNKTLEYKAINIEKGNKTAYDFVKEKYGEKGLQQYLNRCESLFKGHRTKLRKLKMGQENIPEGFIDRDLRNTQYIAKKALAMLNEICRRVVATTGSITDRLREDWQLVDVLKELRCFRYFKDTKMKANHNKNIFYTSIKVDVSDTSKILK

SEQ ID NO: 795 - protein, 1049 aa, Tistrella mobilis
MINERLTFGIDLGIGSCGWAVLRHADAAGEPGVIEGLGSWCFDVPETSKERIPTNQVRRSNRLLRRVIRRRRNRMAEIRRLFHAQGLLPSADEDALKRPRLDPWELRARGLDQCLSAEEFAVALGHIARHRGFRSSAKRKAANTSGEDSKMLSALLVTRERTARYRTVGEMFARDPEYSARRRNRDGIFDRTVARDDLIHEVGKLFEAQRARGSAFASPDLEADFNAIAFRQAEMQDSERLVGNCPFERDEKRAARWAPSFERFRLLTRLINLRIATAEGERRFTPEDLARVSAELGATAKLPVSRVRALIGLLPDERFTTIRVEDEDRDIVARTGEAAPGTWRLRKTLGEALWAEMQARPDQLDAIAHVLSFFEATAKIRSELDRLGLPAAVIEALDRGLEDGAFAKFKGAGHISAKACRNLLPHLQQGHRYDQACRLAGYDHAASTLSHTAQVVSKAGFNALVTELGESIANPIARKALTEGLKQIRAMCARWGLPGAIHIELAREVGNSIEKRRELESQRETTTKRRQTERDEIRGLLALEDVDDDTLLRYRLWKEQGGKCLYTGKDIHVRQLIATDNSVQVDHILPWSRFGDDSFNNKTLCLASANQRKRGQTPWEWFSLTGTPEAWEVFASRVETSKDLRGFKKRNLLLKNADEVAQRFRSRNLNDTRYAARLLAEAAKLFYPAGDRQEKDGRRRVLTRPGPLTAALRHAWGLESLKKADGKRVSDDRHHALDALAVAAISEREVQRLTRSFQEWEQQGLARPLRHVAPPWPGFRGDVLAAYAQAFVARPERRRARGKGHDASIRQVVGEGPEAQVFERRGLADLKEADLDRVKDPERNQAIIEAVRAWILAGRPADAPPRSPRGDVIVKLRTAPAKKIKPAVPVRGGTADRGDMVRIDVFTRPNRKGRDEWYLVPIYPHQVMNRKAWPHPPMRSVVAYKDEAGWTEIGAEHSFRFSLYPRSYVQLVKSNGDVIEGYLVSMDRSTGAFRVFVHNNPAEMAKGIGAKTLLNLRKFNVDRFGVRTEVKSEVRTWHGEVCTSPVPPD

SEQ ID NO: 796 - protein, 1395 aa, Treponema denticola
MKKEIKDYFLGLDVGTGSVGWAVTDTDYKLLKANRKDLWGMRCFETAETAEVRRLHRGARRRIERRKKRIKLLQELFSQEIAKIDEGFFQRMKESPFYAEDKTILQENALFNDKDFTDKTYHKAYPTINHLIKAWIENKVKPDPRLLYLACHNIIKKRGHFLFEGDFDSENQFDTSIQALFEYLREDMEVDIDADSQKVKEILKDSSLKNSEKQSRLNKILGLKPSDKQKKAITNLISGNKINFADLYDNPDLKDAEKNSISFSKDDFDALSDDLASILGDSFELLLKAKAVYNCSVLSKVIGDEQYLSFAKVKIYEKHKTDLTKLKAVIKKHFPNNYKKVFGYNQDNESKNNYSGYVGVCKTKNKKLVINNSVNQEDFYKFLKPILSAKSEIKEVNDILAEIETGNFLPKQISKSNAEIPYQLRKMELEKILSNAEKHFSFLKQKDEKGLSHSEKIIMLLTFKIPYYIGPINDNHKKSFPDRCWVVKKEKSPSGKTTPWNFFDHIDKEKTAEEFITSRTNFCTYLIGESVLPKNSLLYSEYTVLNEINNLQIIIDGKNICDTKLKQKIYEDLFKKYKKITQKQISTFIKHEGICNKTDEVIILGIDKECTSSLKSYIELKNIFGKQVDEISTKNMLEEIIRWATIYDEGEGKTILKTKIKAEYGKYCSDEQIKKILNLKFSGWGRLSRKFLETVTSEMPGFSEPVNIITAMRETQNNLMELLSSEFKFTENIKKINSGFEDAEKQFSYDGLVKPLFLSPSVKKMLWQTLKLVKEISHITQAPPKKIFIEMAKGAELEPARTKTRLKILQDLYSSCKNDADAFSSEIQYLSGKIENEDNLRLRSDKLYLYYTQLGKCMYCGKPIEIGHVFDTSNYDIDHIYPQSKIKDDSISNRVLVCSSCNKNKEDKYPLKSEIQSKQRGFWNFLQRNNFISLEKLNRLTRTTPISDDETAKFIARQLVETRQATKVAAKVLEKMFPETKIVYSKAETVSMFRNKFDIIKCREINDFHHAHDAYLNIVVGNVYNTKFTNNPWNFIKEKRDNPKIADTYNYYKVFDYDVKRNNITAWEKGKTIITVKDMLKRNTPIYTRQAACKKGGLFDQTIMKKGLGQHPLKKEGPFSNISKYGGYNKVSAAYYTLIEYEEKGNKIRSLETIPLYLVKDIQKDQDVLKSYLTDLLGKKEFKILVPKIKINSLLKINGFPCHITGKTNDSFLLRPAVQFCCSNDEVLYFKKIIRFSEIRSQREKIGKTISPYEDLSFRSYIKENLCKKTKNDEIGEKEFYDLLQKKNLEIYDMLLTKHKDTIYKKRPNSATIDILVKGKEKFKSLIIENQFEVILEILKLFSATRNVSELQHIGGSKYSGVAKIGNKISSLDNCILIYQSITGIFEKRIDLLKV

SEQ ID NO: 797 - protein, 769 aa, Treponema denticola
MKKEIKDYFLGLDVGTGSVGWAVTDTDYKLLKANRKDLWGMRCFETAETAEVRRLHRGARRRIERRKKRIKLLQELFSQEIAKIDEGFFQRMKESPFYAEDKTILQENALFNDKDFTDKTYHKAYPTINHLIKAWIENKVKPDPRLLYLACHNIIKKRGHFLFEGDFDSENQFDTSIQALFEYLREDMEVDIDADSQKVKEILKDSSLKNSEKQSRLNKILGLKPSDKQKKAITNLISGNKINFADLYDNPDLKDAEKNSISFSKDDFDALSDDLASILGDSFELLLKAKAVYNCSVLSKVIGDEQYLSFAKVKIYEKHKTDLTKLKAVIKKHFPNNYKKVFGYNQDNESKNNYSGYVGVCKTKNKKLVINNSVNQEDFYKFLKPILSAKSEIKEVNDILAEIETGNFLPKQISKSNAEIPYQLRKMELEKILSNAEKHFSFLKQKDEKGLSHSEKIIMLLTFKIPYYIGPINDNHKKSFPDRCWVVKKEKSPSGKTTPWNFFDHIDKEKTAEEFITSRTNFCTYLIGESVLPKNSLLYSEYTVLNEINNLQIIIDGKNICDTKLKQKIYEDLFKKYKKITQKQISTFIKHEGICNKTDEVIILGIDKECTSSLKSYIELKNIFGKQVDEISTKNMLEEIIRWATIYDEGEGKTILKTKIKAEYGKYCSDEQIKKILNLKFSGWGRLSRKFLETVTSEMPGFSEPVNIITAMRETQNNLMELLSSEFKFTENIKKINSGFEDAEKQFSYDGLVKPLFLSPSVKKCCGRL

SEQ ID NO: 798 - protein, 1395 aa, Treponema denticola
MKKEIKDYFLGLDVGTGSVGWAVTDTDYKLLKANRKDLWGMRCFETAETAEVRRLHRGARRRIERRKKRIKLLQELFSQEIAKIDEGFFQRMKESPFYAEDKTILQENALFNDKDFTDKTYHKAYPTINHLIKAWIENKVKPDPRLLYLACHNIIKKRGHFLFEGDFDSENQFDTSIQALFEYLREDMEVDIDADSQKVKEILKDSSLKNSEKQSRLNKILGLKPSDKQKKAITNLISGNKINFADLYDNPDLKDAEKNSISFSKDDFDALSDDLASILGDSFELLLKAKAVYNCSVLSKVIGDEQYLSFAKVKIYEKHKTDLTKLKAVIKKHFPNNYKKVFGYNQDNESKNNYSGYVGVCKTKNKKLVINNSVNQEDFYKFLKPILSAKSEIKEVNDILAEIETGNFLPKQISKSNAEIPYQLRKMELEKILSNAEKHFSFLKQKDEKGLSHSEKIIMLLTFKIPYYIGPINDNHKKSFPDRCWVVKKEKSPSGKTTPWNFFDHIDKEKTAEEFITSRTNFCTYLIGESVLPKNSLLYSEYTVLNEINNLQIIIDGKNICDTKLKQKIYEDLFKKYKKITQKQISTFIKHEGICNKTDEVIILGIDKECTSSLKSYIELKNIFGKQVDEISTKNMLEEIIRWATIYDEGEGKTILKTKIKAEYGKYCSDEQIKKILNLKFSGWGRLSRKFLETVTSEMPGFSEPVNIITAMRETQNNLMELLSSEFKFTENIKKINSGFEDAEKQFSYDGLVKPLFLSPSVKKMLWQTLKLVKEISHITQAPPKKIFIEMAKGAELEPARTKTRLKILQDLYSSCKNDADAFSSEIQYLSGKIENEDNLRLRSDKLYLYYTQLGKCMYCGKPIEIGHVFDTSNYDIDHIYPQSKIKDDSISNRVLVCSSCNKNKEDKYPLKSEIQSKQRGFWNFLQRNNFISLEKLNRLTRTTPISDDETAKFIARQLVETRQATKVAAKVLEKMFPETKIVYSKAETVSMFRNKFDIIKCREINDFHHAHDAYLNIVVGNVYNTKFTNNPWNFIKEKRDNPKIADTYNYYKVFDYDVKRNNITAWEKGKTIITVKDMLKRNTPIYTRQAACKKGELFNQTIMKKGLGQHPLKKEGPFSNISKYGGYNKVSAAYYTLIEYEEKVNKIRSLETIPLYLVKDIQKDQDVLKSYLTDLLGKKEIKILVPKIKINSLLKINGFPCHITGKTGDSFVLRPAVQFCCSNDEVLYFKKIIRFNEIRSQREKMGKTISPYEDLSFRSYIKENLCKKTKADEIGEKEFYDLLQKKNLEIYDMLLTKHKDTIYNKRPNSTTLGMLTKGRYEFINLKPKDQIIVMLEILKLFCTTREAIDLGLIKGKPAAGVATLGKKISNLDNCILIYQSITGIFEKRIDLLKV

SEQ ID NO: 799 - protein, 1395 aa, Treponema denticola
MKKEIKDYFLGLDVGTGSVGWAVTDTDYKLLKANRKDLWGMRCFETAETAEVRRLHRGARRRIERRKKRIKLLQELFSQEIAKIDEGFFQRMKESPFYAEDKTILQENTLFNDKDFTDKTYHKAYPTINHLIKAWIENKVKPDPRLLYLACHNIIKKRGHFLFEGDFDSENQFDTSIQALFEYLREDMEVDIDADSQKVKEILKDSSLKNSEKQSRLNKILGLKPSDKQKKAITNLISGNKINFADLYDNPDLKDAEKNSISFSKDDFDALSDDLASILGDSFELLLKAKAVYNCSVLSKVIGDEQYLSFAKVKIYEKHKTDLTKLKNVIKKHFPKDYKKVFGYNKNEKNNNNYSGYVGVCKTKSKKLIINNSVNQEDFYKFLKTILSAKSEIKEVNDILTEIETGTFLPKQISKSNAEIPYQLRKMELEKILSNAEKHFSFLKQKDEKGLSHSEKIIMLLTFKIPYYIGPINDNHKKSFPDRCWVIKKEKSPSGKTTPWNFFDHIDKDKTAEAFITSRTNFCTYLVGESVLPKSSLLYSEYTVLNEINNLQIIIDGKNICDIKLKQKIYEELFKKYKKITQKQISTFIKHEGICNKTDEVIILGIDKECTSSLKSYIELKNIFGKQVDEISTKNMLEEIIRWATIYDEGEGKTILKTKIKAEYGKYCSDEQIKKILNLKFSGWGRLSRKFLETVTSEMPGFSEPVNIITAMRETQNNLMELLSSEFKFTENIKKINSGFEDAEKQFSYNGLVKPLFLSPSVKKMLWQTLKLVKEISHITQAPPKKIFIEMAKGAELEPARTKTRLKILQDLYNNCKNDADAFSSEIKDLSGKIENEDNLRLRSDKLYLYYTQLGKCMYCGKPIEIGHVFDTSNYDIDHIYPQSKIKDDSISNRVLVCSSCNKNKEDKYPLKSEIQSKQRGFWNFLQRNNFISLEKLNRLTRTTPISDDETAKFIARQLVETRQATKVAAKVLEKMFPETKIVYSKAETVSMFRNKFDIIKCREINDFHHAHDAYLNIVVGNVYNTKFTNNPWNFIKEKRDNPKIADTYNYYKVFDYDVKRNNITAWEKGKTIITVKDMLKRNTPIYTRQAACKKGGLFDQTIMKKGLGQHPLKKEGAFSNISKYGGYNKVSAAYYTLIEYEEKGNKIRSLETIPLYLVKDIQKDQDVLKSYLTDLLGKKEIKILVPKIKINSLLKINGFPCHITGKTGDSFVLRPAVQFCCSNDEVLYFKKIIRFNEIRSQREKMGKTISPYEDLSFRSYIKENLCKKTKADEIGEKEFYDLLQKKNLEIYDMLLTKHKDTIYNKRPNSTTLGMLTKGRYEFINLKPKDQIIVMLEILKLFCTTREAIDLGLIKGKPAAGVATLGKKISNPDNCILIYQSITGIFEKRIDLLKV

SEQ ID NO: 800 - protein, 1395 aa, Treponema denticola
MKKEIKDYFLGLDVGTGSVGWAVTDTDYKLLKANRKDLWGMRCFETAETAEVRRLHRGARRRIERRKKRIKLLQELFSQEIAKIDEGFFQRMKESPLYAEDKTILQENTLFNDKDFTDKTYHKAYPTINHLIKAWIENKVKPDPRLLYLACHNIIKKRGHFLFEGDFDSENQFDTSIQALFEYLREDMELDIDADSQKVKEILKDSSLKNSEKQSRLNKMLGLKPSDKQKKAITNLISGNKINFADLYDNPDLKDAEKNSISFSKDDFDALSDDLASILGDSFELLLKAKAVYNCSVLSKVIGDEQYLSFAKVKIYEKHKTDLTKLKNVIKKHFPKDYKKVFGYNKNEKNNNNYSAYVGVCKITHKKLVIKNSASQEDFYKFLKTILSAKSEIKEVNDILTEIETGTFLPKQISKSNAEIPYQLRKMELEKILSNAEKHFSFLKQKDEKGLSHSEKIIMLLTFKIPYYIGPINDNHKKSFPDRCWVVKKEKSPSGKTTPWNFFDHIDKEKTAEEFITSRTNFCTYLIGESVLPKSSLLYSEYTVLNEINNLQIIIDGKNICDIKLKQKIYEELFKKYKKITQKQISTFIKHEGICNKTDEVIILGIDKECTSSLKSYIELKNIFGKQVDEISTKNMLEEIIRWATIYDEGEGKTILKTKIKAEYGKYCSDEQIKKILNLKFSGWGRLSRKFLETVTSEMPGFSEPVNIITAMRETQNNLMELLSSEFKFTENIKKINSGFEDAEKQFSYNGLVKPLFLSPSVKKMLWQTLKLVKEISHITQAPPKKIFIEMAKGAELEPARTKTRLKILQDLYSSCKNDADAFSSEIQYLSGKIENEDNLRLRSDKLYLYYTQLGKCMYCGKPIEIGHVFDTSNYDIDHIYPQSKIKDDSISNRVLVCSSCNKNKEDKYPLKAEIQSKQRGFWNFLQRNNFISLEKLNRLTRTSPISDDETAKFIARQLVETRQATKVAAKVLEKMFPETKIVYSKAETVSMFRNKFDIIKCREINDFHHAHDAYLNIVVGNVYNTKFTNNPWNFIKEKRDNPKIADTYNYYKVFDYDVKRNNITAWEKGKTIITVKDMLKRNTPIYTRQAACKKGELFNQTIMKKGLGQHPLKKEGPLSNISKYGGYNKVSAAYYTLIEYEEKGSKIRSLETIPLYLVKDIQKNKDGLKSYLTDQIGKKEIKILIPKIKINSLLKINGFPCHITGKMGEAFVLRPAVQFCCSNDEALYFKKIIRFNEIRKQREKMGKTISPYEDLSFRSYIKDNLCKKTKADEIEEKEFYDLLQKKNLEIYDMLLTKHKDTIYKKRPNSATIDILVKGKEKFKSLIIENQFEVILEILKLFSATRNVSDLQHIGGSKNAGNARVGNKISSLDNCILIYQSITGIFEKRIDLLKI

SEQ ID NO: 801 - protein, 1395 aa, Treponema denticola
MKKEIKDYFLGLDVGTGSVGWAVTDTDYKLLKANRKDLWGMRCFETAETAEVRRLHRGARRRIERRKKRIKLLQELFSQEIAKIDEGFFQRMKESPLYAEDKTILQENTLFNDKDFTDKTYHKAYPTINHLIKAWIENKVKPDPRLLYLACHNIIKKRGHFLFEGDFDSENQFDTSIQALFEYLREDMEVDIDADSQKVKEILKDSSLKNSEKQSRLNKMLGLKPSDKQKKAITNLISGNKINFADLYDNPDLKDAEKNSISFSKDDFDALSDDLASILGDSFELLLKAKAVYNCSVLSKVIGDEQYLSFAKVKIYEKHKTDLTKLKNVIKKHFPKDYKKVFGYNKNEKNNNNYSGYVGVCKTKSKKLIINNSVNQEDFYKFLKTILSAKSEIKEVNDILTEIETGTFLPKQISKSNAEIPYQLRKMELEKILSNAEKHFSFLKQKDEKGLSHSEKIIMLLTFKIPYYIGPINDNHKKSFPDRCWVVKKEKSPSGKTTPWNFFDHIDKEKTAEEFITSRTNFCTYLIGESVLPKNSLLYSEYTVLNEINNLQIIIDGKNICDTKLKQKIYEELFKKYKKITQKQISTFIKHEGICNKTDEVIILGIDKECTSSLKSYIELKNIFGKQVDEISTKNMLEEIIRWATIYDEGEGKTILKTKIKAEYGKYCSDEQIKKILNLKFSGWGRLSRKFLETVTSEMPGFSEPVNIITAMRETQNNLMELLSSEFKFTENIKKINSGFEDVEKQFSYDGLVKPLFLSPSVKKMLWQTLKLVKEISHITQAPPKKIFIEMAKGAELDPVRTKTRLKILQDLYNNCKNDADAFSSEIKDLSGKIENEDNLRLRSDKLYLYYTQLGKCMYCGKPIEIGHVFDTSNYDIDHIYPQSKIKDDSISNRVLVCSSCNKNKEDKYPLKAEIQSKQRGFWNFLQRNNFISLEKFNRLTRATPISDDETAKFIARQLVETRQATKVAARVLEKMFPETKIVYSKAETVSMFRNKFDIVKCREINDFHHAHDAYLNIVVGNVYNTKFTNNLWNFIKEKRDNPKIADTYNYYKVFDYDVKRNNITAWEKGKTIITVKDMLKRNTPIYTRQAACKKGGLFDQTIMKKGLGQHPLKKEGPFSNISKYGGYNKVSAAYYTLIEYEEKGNKIRSLETIPLYLVKDIQKDQDVLKSYLTDLLGKKEFKILVPKIKINSLLKINGFPCHITGKTNDSFLLRPAVQFCCSNDEVLYFKKIIRFSEIRSQREKIGKTISPYEDLSFRSYIKENLCKKTKNDEIGEKEFYDLLQKKNLEIYDMLLTKHKDTIYKKRPNSATIDILVKGKEKFKSLIIENQFEVILEILKLFSATRNVSDLQHIGGSKYSGVAKIGNKISSLDNCILIYQSITGIFEKRIDLLKV

SEQ ID NO: 802 - protein, 357 aa, Treponema denticola
MKKEIKDYFLGLDVGTGSVGWAVTDTDYKLLKANRKDLWGMRCFETAETAEVRRLHRGARRRIERRKKRIKLLQELFSQEIAKTDEGFFQRMKESPFYAEDKTILQENALFNDRDFTDKTYHKAYPTINHLIKAWIENKVKPDPRLLYLACHNIIKKRGHFLFEGDFDSENQFDTSIQAFFEYLREDMEVDIDADSQKIKEILKDSSLKNSEKQSRLNKILGLKSSDKQKKAITNLISGNKINFADLYDNPDLKDAEKNSISFSKDDFDALSDDLASILGDSFELLLKAKAVYNCSVLSKVIGDEQYLSFAKVKIYEKHKTDLTKLKNVIKKHFPKDYKKVFGYNKNEKITTITPDM

SEQ ID NO: 803 - protein, 1395 aa, Treponema denticola
MKKEIKDYFLGLDVGTGSVGWAVTDTDYKLLKANRKDLWGMRCFETAETAEVRRLHRGARRRIERRKKRIKLLQELFSQEIAKTDEGFFQRMKESPFYAEDKTILQENALFNDRDFTDKTYHKAYPTINHLIKAWIENKVKPDPRLLYLACHNIIKKRGHFLFEGDFDSENQFDTSIQALFEYLREDMEVDIDADSQKVKEILKDSSLKNSEKQSRLNKMLGLKPSDKQKKAITNLISGNKINFADLYDNPDLKDAEKNSISFSKDDFDALSDDLASILGDSFELLLKAKAVYNCSVLSKVIGDEQYLSFAKVKIYEKHKTDLTKLKNVIKKHFPNDYKKVFGYNKNEKNNNNYSAYVGVCKTKSKKLVINNTVNQEDFYKFLKPILLAKSEIKEVNDILTEIETGTFLPKQISKSNAEIPYQLRKMELEKILSNAEKHFSFLKQKDEKGLSHSEKIIMLLTFKIPYYIGPINDNHKKSFPDRCWVIKKEKSPSGKTTPWNFFDHIDKDKTAEAFITSRTNFCTYLVGESVLPKNSLLYSEYTVLNEINNLQIIIDGKNICDIKLKQKIYEELFKKYKKITQKQISTFIKHEGICNKTDEVIILGIDKECTSSLKSYIELKNIFGKQVDEISTKNMLEEIIRWATIYDEGEGKTILKTKIKAEYGKYCSDEQIKKILNLKFSGWGRLSRKFLETVTSEMPGFSEPVNIITAMRETQNNLMELLSSEFKFTENIKKINSGFEDVEKQFSYDSLVKPLFLSPSVKKMLWQTLKLVKEISHITQAPPKKIFIEMAKGAELDPVRTKTRLKILQDLYNNCKNDADAFSSEIKDLSGKIENEDNLRLRSDKLYLYYTQLGKCMYCGKPIEIGHVFDTSNYDIDHIYPQSKIKDDSISNRVLVCSSCNKNKEDKYPLKAEIQSKQRGFWNFLQRNNFISLEKLNRLTRTSPISDDETAKFIARQLVETRQATKVAAKVLEKMFPETKIVYSKAETVSMFRNKFDIIKCREINDFHHAHDAYLNIVVGNVYNTKFTNNPWNFIKEKRDNPKIADTYNYYKVFDYDVKRNNITAWEKGKTIITVKDMLKRNTPIYTRQAACKKGELFNQTIMKKGLGQHPLKKEGPLSNISKYGGYNKVSAAYYTLIEYEEKGSKIRSLETIPLYLVKDIQKNKDGLKSYLTDQIGKKEIKILIPKIKINSLLKINGFPCHITGKMGEAFVLRPAVQFCCSNDEALYFKKIIRFNEIRKQREKMGKTISPYEDLSFRSYIKDNLCKKTKADEIEEKEFYDLLQKKNLEIYDMLLTKHKDTIYKKRPNSATIDILVKGKEKFKSLIIENQFEVILEILKLFSATRNVSDLQHIGGSKNAGNARVGNKISSLDNCILIYQSITGIFEKRIDLLKI

SEQ ID NO: 804 - protein, 631 aa, Treponema denticola
MLWQTLKLVKEISHITQAPPKKIFIEMAKGAELEPARTKTRLKILQDLYNNCKNDADAFSSEIKDLSGKIENEDNLRLRSDKLYLYYTQLGKCMYCGKPIEIGHVFDTSNYDIDHIYPQSKIKDDSISNRVLVCSSCNKNKEDKYPLRSEIQSKQRGFWNFLQRNNFISLEKLNRLTRTTPISDDETAKFIARQLVETRQATKVAAKVLEKMFPETKIVYSKAETVSMFRNKFDIVKCREINDFHHAHDAYLNIVVGNIYNTKFTNNPWNFIKEKRDNPKIADTYNYYKVFDYDVKRNNITAWEKGKTIITVKDMLKRNTPIYTRQAACKKGGLFDQTIMKKGLGQHPLKKEGPFSNISKYGGYNKVSAAYYTLIEYEEKENKIRSLETIPLYLVKDIQKSQEKLKSYLTDLLGKKEIKILVPKIKINSLLKINGFPCHITGKTNDSFLLRPAVQFCCSNDEVLYFKKIIRFNEIRSQREKMGKTISPYEDLSFRSYIKENLCKKTKNDEIGEKEFYDLLQKKNLEIYDMLLTKHKDTIYNKRPNSTTLGMLTKGRYEFINLKPKDQIIVMLEILKLFCTTREAIDLGLIKGKPAAGVATLGKKISNLDNCILIYQSITGIFEKRIDLLKV

SEQ ID NO: 805 - protein, 631 aa, Treponema denticola
MLWQTLKLVKEISHITQAPPKKIFIEMAKGAELEPARTKTRLKILQDLYSSCKNDADAFSSEIQYLSGKIENEDNLRLRSDKLYLYYTQLGKCMYCGKPIEIGHVFDTSNYDIDHIYPQSKIKDDSISNRVLVCSSCNKNKEDKYPLKSEIQSKQRGFWNFLQRNNFISLEKLNRLTRTTPISDDETAKFIARQLVETRQATKVAAKVLEKMFPETKIVYSKAETVSMFRNKFDIIKCREINDFHHAHDAYLNIVVGNVYNTKFTNNPWNFIKEKRDNPKIADTYNYYKVFDYDVKRNNITAWEKGKTIITVKDMLKRNTPIYTRQAACKKGELFNQTIMKKGLGQHPLKKEGPFSNISKYGGYNKVSAAYYTLIEYEEKVNKIRSLETIPLYLVKDIQKDQDVLKSYLTDLLGKKEIKILVPKIKINSLLKINGFPCHITGKTGDSFVLRPAVQFCCSNDEVLYFKKIIRFNEIRSQREKMGKTISPYEDLSFRSYIKENLCKKTKADEIGEKEFYDLLQKKNLEIYDMLLTKHKDTIYNKRPNSTTLGMLTKGRYEFINLKPKDQIIVMLEILKLFCTTREAIDLGLIKGKPAAGVATLGKKISNLDNCILIYQSITGIFEKRIDLLKV

SEQ ID NO: 806 - protein, 370 aa, Treponema denticola
MTEIETGTFLPKQISKSNAEIPYQLRKMELEKILSNAEKHFSFLKQKDEKGLSHSEKIIMLLTFKIPYYIGPINDNHKKSFPDRCWVVKKEKSPSGKTTPWNFFDHIDKEKTAEEFITSRTNFCTYLVGESVLPKSSLLYSEYTVLNEINNLQIIIDGKNICDIKLKQKIYEELFKKYKKITQKQISTFIKHEGICNKTDEVIILGIDKECTSSLKSYIELKNIFGKQVDEISTKNMLEDIIRWAAIYDEGEGKTILKTKIKAEYGKYCSDEQIKKILNLKFSGWGRLSRKFLETVTSEMPGFSEPVNIITAMRETQNNLMELLSSEFKFTENIKKINSGFEDVEKQFSYDGLVKPLFLSPSVKKCCGRL

SEQ ID NO: 807 - protein, 591 aa, Treponema phagedenis
MARGKEAEKGRTSSRYASIKALYENCKQDLADYDAVLEQFKSEEPLRLRSDKLYLYYTQLGRCMYTGRVIDIDRLMSDNSAYDIDHIYPRSKIKDDSLTNRVLVVKDANQDKRDEPLSPQIQDKQKGFWDFLKHNNFISIEKYERLTYRGYFTEEMLSGFIARQLVETRQGTKTAGQILEQLYPDSTVVYCKAANTSEFRQKFNLIKCREINDLHHAHDAYLNIAVGNVYYTKFTSNPRNFMKLKEPYNLRELFDRDVERNNTIAWVKNKTITTIKDMLKRNTPLYTRYAYCKTGGFFDQNIMKKGKGQFPLKENSPLSDISKYGGYNKVSGAYFILVQKKEKDAVVRILETVPLYLLNKPGKESENVREYLSTALGTKDFKILIPKIKINSLFKINGFLVHITGKTNDRFLVRSAVQFFCDDNLTLFFKRIIAFNGLRNLNKDKSMTAYDDNTMRVYVRGNLFKDKNQLFDKNKFNEIVKGKNISVYKDMVKRYETSIYKFRPNTAVIPILKSGEDKFINLPIEEQFKILQEILKLFGAINGTANLTLIGGRPSTGEMKISNNISNLKQCILIHQSPTGVFEQQIDLLKI

SEQ ID NO: 808 - protein, 1062 aa, Treponema sp.
MIMKLEKWRLGLDLGTNSIGWSVFSLDKDNSVQDLIDMGVRIFSDGRDPKTKEPLAVARRTARSQRKLIYRRKLRRKQVFKFLQEQGLFPKTKEECMTLKSLNPYELRIKALDEKLEPYELGRALFNLAVRRGFKSNRKDGSREEVSEKKSPDEIKTQADMQTHLEKAIKENGCRTITEFLYKNQGENGGIRFAPGRMTYYPTRKMYEEEFNLIRSKQEKYYPQVDWDDIYKAIFYQRPLKPQQRGYCIYENDKERTFKAMPCSQKLRILQDIGNLAYYEGGSKKRVELNDNQDKVLYELLNSKDKVTFDQMRKALCLADSNSFNLEENRDFLIGNPTAVKMRSKNRFGKLWDEIPLEEQDLIIETIITADEDDAVYEVIKKYDLTQEQRDFIVKNTILQSGTSMLCKEVSEKLVKRLEEIADLKYHEAVESLGYKFADQTVEKYDLLPYYGKVLPGSTMEIDLSAPETNPEKHYGKISNPTVHVALNQTRVVVNALIKEYGKPSQIAIELSRDLKNNVEKKAEIARKQNQRAKENIAINDTISALYHTAFPGKSFYPNRNDRMKYRLWSELGLGNKCIYCGKGISGAELFTKEIEIEHILPFSRTLLDAESNLTVAHSSCNAFKAERSPFEAFGTNPSGYSWQEIIQRANQLKNTSKKNKFSPNAMDSFEKDSSFIARQLSDNQYIAKAALRYLKCLVENPSDVWTTNGSMTKLLRDKWEMDSILCRKFTEKEVALLGLKPEQIGNYKKNRFDHRHHAIDAVVIGLTDRSMVQKLATKNSHKGNRIEIPEFPILRSDLIEKVKNIVVSFKPDHGAEGKLSKETLLGKIKLHGKETFVCRENIVSLSEKNLDDIVDEKIKSKVKDYVAKHKGQKIEAVLSDFSKENGIKKVRCVNRVQTPIEITSGKISRYLSPEDYFAAVIWEIPGEKKTFKAQYIRRNEVEKNSKGLNVVKPAVLENGKPHPAAKQVCLLHKDDYLEFSDKGKMYFCRIAGYAATNNKLDIRPVYAVSYCADWINSTNETMLTGYWKPTPTQNWVSVNVLFDKQKARLVTVSPIGRVFRK

SEQ ID NO: 809 - protein, 281 aa, Treponema vincentii
MKTLGLDIGTNSIGWGIVDETANKIEDCGVYIFPEGVKKEKGNESSKAAERTSFRLARRLKFRRKLRKCETLKVLIKNKMCPLTMEELEKWRKQKIYPVSQDFLNWYRTDELKNWEPYFLRKKCAEQKAGPYEIGRALYHLAQRRGFLSNRKESTKASDGKVSKSIDELSSLMDGRTLGQYFYELKQSGEKVRGKYTSRKEHYEKEFNKICEVQEISPELKDDLYRAIFFQRKLKSQKFLVGKCTFERNKPRAPISHFEFEEFRMLSFINSIKIAKKLRRR

SEQ ID NO: 810 - protein, 675 aa, uncultured bacterium
MTAENYSNVRFAFDIGTNSIGWAVFQLNDKQEATSILNAGARIFSDGRDPKTFEPLAVRRRNVRSASRMRDRYLRRRKRTLDKLIGYGLLPEDKAERDKILLETNDKPSGSTDKKTDPYSLRARALEEKLPLAYVARALFHIGQRRGFKSNRKADRKSNEKGKIAAGIEELSGLMHQSHAPTLGAYLAKRREEGHVVRLRASSEALTNKAYAFYPERAMLEDEFHKIWQAQAEYYPDVLTKEREEELFHVMFFQRPLKEQKVGLCTLVEGELRLPKSDPLFQQFRLYKEINELAIILPDLSQRKLTMEERDTLITLMRPAKTKTFAALRKALKIPAGGRFNKETENRKQLTGDEVYSVFSKPELFGGDWAKFSIEQQREIIDQLNNEENPDKLEEWLKNKFPKLSDEQRSEIINANLPDGYGRFGITATSKILEQLKKDVISEAEAAHRCGFDHSLANRNWKGLDELPRYQEVLERHIVPGTGDKNDIYDIYKGRLTNPTVHIGLNQVRRLTNRLIKAYGKPWQIVVELARDLPMSSEERKEHNKTLNDNIKAGFERTQKLERLGQKDNANNRLLLKLWEELGKDPDDRKSIYSGTRITEPMLFSGEVEIDHILPFSLTYDDSYANKILCLREENRIKRNRAPADVTEWKDRYDEIIGRSKNCQRTNKNVLGPMQ

SEQ ID NO: 811 - protein, 1017 aa, uncultured bacterium]
MRVDSLGRCLSDEEWARVIYHLCKHRGFHWISRAEAKQTEGDSKSEGGKVKQGLAGTAKLMDEKGYRSAAEMVLAEFPEAQRNKQGEYRKALSRELLAKELALLFARQRVFGNRHATDTLETAILGNSDKKSGLFWQQKPALAGADLLKMLGTCTFEKNEYRAPKASFTAERHVWLTRLNNLRIVTDGITRQLTEQERQLVLPLPYRQAGDLTYKQLGMALTKAGLLEAGCFKFIGLAYPTEAQKAEGKTKDPESATLVKIPAWQELRQTLNKASLNDEWEKLSGDALCGQPEIFDKIAWILSVYKDDDEVRTELAKLVLPNPEGLTEALLNIRFDKFHALSLKALRAIVPHMEKGLRYDEACVQAGYHHSQLHKIGEGEHKYLPPLYDGRDGDGRMIFAEDADIPRNPVVLRSLNQARKVVNAIIRRYGSPSAVHIEMARDLSRPFDERNKIKKDQDEYQARNQRDREQFIELFGHPPKGLEFEKWRLYREQNGQCAYSQKPLASSGDVAEIFLDGSTEIDHALPYSRSFDDSKNNKVLVLTRENRDKGNRTPYEYLGGAENSERWQRFFSFVESNKAYRLAKRTRLLRKDFGAKESEEFRERNLNDTRYVCRFFKNYVEQHLKLAEGSEAKRCVVVSGQLTNFLRTRWGLLKIRSDSDRHHALDAAVVAACSHSMVQRLSNYSRTRELEQVRDGFVNIETGEIVNPAMHQQLREHFPDPWPYFRHELEARLKIDSPALLREEMARLSSYTEEELAALKPLFVSRAPQRRNGGAAHKDTIYGQPEKLKKNGSVSQKVALASLALKDIDLLADPHRNAKLYGAIRERLEAHGGKGDKAFPATNPLRKPDKEGNPTGPIVRTVTKVIDKLSGIPVRGGIAKNDTMLRVDVFTKAGRFHLVPVYVHHRVTGLPNQAITRGKDENQWAIIDDTFEWRFSLYPNDLVQIRLKDETHLGYYASTDRSTSSISIWAHDRNQSVGKDGLIRSIGVTTAKDIEKFHVDTLGNVYPAPPEKRRGLA

SEQ ID NO: 812 - protein, 600 aa, uncultured bacterium]
VNAIIKKHGSLSAVHIEMARDLSRPLDERREVKKLQEEFKDRNDKARESFEADHGYRPKGIVFEKWMLYREQHGKCAYSMEGLDIDRVLNDANYAQIDHALPYSRSYDDSKNNKVLVLTRENQNKGNRTAYEYLTSFAGGEDGDRWRNYAAWVNSNKSYRMAKRNRLLRKNYGPDEASGFKDRNLNDTRYICKFFKNYVEEHLQLAPRADGNANKRCVVVNGQLTAFLRARWGLSKVRSESDRHHALDAAVVAACSHGMVKALADYARNKEVAYLREGFPDPETGEIINPEAHARGVHHFPEPWAHFRHELQVRLYSDDLQALREDLQRLGTYSEQDLLGVRTLFVSRAPQRRNDGAVHKETIYAQPEALRKQGGVVQKVPLTSLSLKDLDNLADPHRNAKLYTALRARLEAHGGKADKAFGPDQPFYKPDKNGNPTGPIVRTIKLVIDKLSGIPIRGGVAKNDTMLRVDVFTKAGKFHLVPVYVHHRVTGLPDRAIVAFKDEVEWTQVDDSFKFLFSIHPNDLIRIGLKAKEPMIGYFASCHRGTGAFNVWSHDRNTSVGKSGSVEGIGIKTALSLEKLNIDVLGNVYPARPEQRHGLA

SEQ ID NO: 813 - protein, 1011 aa, uncultured delta
MSSKAIDSLEQLDLFKPQEYTLGLDLGIKSIGWAILSGERIANAGVYLFETAEELNSTGNKLISKAAERGRKRRIRRMLDRKARRGRHIRYLLEREGLPTDELEEVVVHQSNRTLWDVRAEAVERKLTKQELAAVLFHLVRHRGYFPNTKKLPPDDESDSADEEQGKINRATSRLREELKASDCKTIGQFLAQNRDRQRNREGDYSNLMARKLVFEEALQILAFQRKQGHELSKDFEKTYLDVLMGQRSGRSPKLGNCSLIPSELRAPSSAPSTEWFKFLQNLGNLQISNAYREEWSIDAPRRAQIIDACSQRSTSSYWQIRRDFQIPDEYRFNLVNYERRDPDVDLQEYLQQQERKTLANFRNWKQLEKIIGTGHPIQTLDEAARLITLIKDDEKLSDQLADLLPEASDKAITQLCELDFTTAAKISLEAMYRILPHMNQGMGFFDACQQESLPEIGVPPAGDRVPPFDEMYNPVVNRVLSQSRKLINAVIDEYGMPAKIRVELARDLGKGRELRERIKLDQLDKSKQNDQRAEDFRAEFQQAPRGDQSLRYRLWKEQNCTCPYSGRMIPVNSVLSEDTQIDHILPISQSFDNSLSNKVLCFTEENAQKSNRTPFEYLDAADFQRLEAISGNWPEAKRNKLLHKSFGKVAEEWKSRALNDTRYLTSALADHLRHHLPDSKIQTVNGRITGYLRKQWGLEKDRDKHTHHAVDAIVVACTTPAIVQQVTLYHQDIRRYKKLGEKRPTPWPETFRQDVLDVEEEIFITRQPKKVSGGIQTKDTLRKHRSKPDRQRVALTKVKLADLERLVEKDASNRNLYEHLKQCLEESGDQPTKAFKAPFYMPSGPEAKQRPILSKVTLLREKPEPPKQLTELSGGRRYDSMAQGRLDIYRYKPGGKRKDEYRVVLQRMIDLMRGEENVHVFQKGVPYDQGPEIEQNYTFLFSLYFDDLVEFQRSADSEVIRGYYRTFNIANGQLKISTYLEGRQDFDFFGANRLAHFAKVQVNLLGKVIK

SEQ ID NO: 814 - protein, 1011 aa, uncultured delta proteobacterium HF0070_07E19; identical to SEQ ID NO: 813

SEQ ID NO: 815 - protein, 1120 aa, Veillonella sp.
MGFKANLVNLFTDEDIEVILPEEKEFKSINLHEGIYEDVRDAYEDAWGDRFAIVDQCKVLHDIIVISSIIKPGQSLSEAKIESYNQHKEDLVLLKSVLKEDRKLYDDMFVVDTDKGTNYVKYTKQGVNGNTSATQEEFYKYVRKVVSVLPETEHTRRIVQKLEEGTFLPLQRISKNGVVPYQLHKEELVRILDKATVNFPFLNKVENGLTVADKIISILEFKIPYYVGPLNPTHSIENGGFAWVVRKEAGQVLPWNFEQKVDVQASAVKFIENLTNKCTYLIDQDVLPKYSLLYAEFSLLNELNNIRVNDKPLPADVKQAFIRDHFISLQDSKTATKKVVAKYLVDNNYVSQPPIITGMDQQIATKLTSHRDMTRILGEHFDHAMAEDIIRYITIFGESKDMLRQVLKNYYGDRLTTEQIKKLGKLTYTGWGRLSKKFLSDIWGMKKNDDDAEAGTIIEHMREGQENLMQLLSSSYSFIDVVQEYVTNVLGEKEKTAFEMLEDLSLSPMVKRSVWQTLRILDEIVSIRKELPKKIFVEVARTNKADKKRTQSRKALLEELYKQIKDEDVHVLQQELESKEDSALNSKKLYLYFTQMGRCMYSGRRIDIHELFTDKYDIDHIYPRSLTKDDSWHNIVLVEKQLNAEKTDRFPILSAIQSKQKGFWKLLWDRGFISEKKYDRLVRTTDLTDEELNQFINRQMVSTNQSVKAVTTLLHQLYPETEVVFSKAENVSDFRHDYDFVKVRSINHHHHAKDAYLNIVVGNVYHEKFTKNFLSFAKQKGTRRTYNLTKIFEYEIKLTEESKKVIWDPNIHMDIVKKMMKSNDVRVTQRAVPQKGGLSDETIYKKGIAKRGVYLPLKSSDERVRDVEKYGGRTSITISEYIILNIRDTSDQDRIEIFSLPLYIAGKKDIHKAIEEAYLSTCKKPASVVDIQILYRGLYIGSKVNINGFTYYMGGKTGSNVSIDSAVDVVMDITSSVYIKLLEKVAIKKIENPKTFRIENIKTSYNHKEVTVSKEQNIALYQELLKKLDTPLFSKMKGNKLEEFRTVGFDTFIALSLEEQASVLLEVLNVLTNFKTKRDITKIGMTSSRSTLGINISNTEQFSVITTSITGLYEQEIKIK

SEQ ID NO: 816 - protein, 983 aa, Verminephrobacter aporrectodeae
MRRRRDRLLKRKARMHDQLMRHGFFPADAAGRKVLERLNPYQLRAKGLHQALTPGEFARALFHINQRRGFQSNRKTDRKDNESGALKQAISELRAQIHDSGCATVGEWFWKERMQQKPEGVHRQGVRARYRETPYTTDEGRQRIDKRYDLYVDRAMIEQEFDALWAVQAALQPGLFTDAACKELRYTLLFQRKLRPVKPGRCTLLPEEERAPLALPSTQRFRILQEVNHLRLLDEALREVPLTLAQRDALVAALESQGKLGFAPMRKLLKLPGTVKFNLEDEKRTELKGNATSAILARKDLFGPAWAGFDAALQDEIVWQLVSEEGEGRLIAWLQQHTGVDEARAEAIADTSLPEGYGSLSRKALERIVPALQREVCSYDKAVQAAGFAHHSDLGFDFEHSGDEVQQVGERIIASTGEVRPLFAFKQLPYYGKALQRHVAFGSGKPEDPEEKRHGKIANPTVHIGLNQVRTVVNALIRRYGRPSEVVVELARDLKQSREQQQETQRKQAENQRRNTRIRERIAETLGISPERVRSSDIQKWILWEELSFDVVDRRCPYSGEQISTTMLLSPKVEIEHILPFSQTLDDSLNNRTVALREANRIKRNRTPWDARADFEARGWSYEGILHRAERMPLRKRYRFAPDGYQRWLGEDKDFLARALNDTRYLSRVAANYLRLVCPKPQGVRVIPGRMTAMLRAKFGLNDVLGLDGEKNRNDHRHHAVDACVIGVTDQGLMQRFARASAQAREDGLTRLVQDMPLPWPSYRDHVERAVRHIWVSHKPDHGFEGAMMEETAYGIRKDGSIKPRRKADGSAGREVVNLIRITESRQPVRHGVDSQGQPLPYKGYVGGSNYCIEITANDQGKWEGAVISTFEAYRIVRASGWGRLRHCSHGQNGRPLMMRLMIGDAVRLALDGSEKTMRVVKISANGQVFLVAPNEANVDARNRDKADPFAYVSKKAGSFQSAKARQVSISPIGELRDPGFKG

SEQ ID NO: 817 - protein, 4 aa, Artificial Sequence
  Synthetic sequence
AAAA

SEQ ID NO: 818 - protein, 4 aa, Artificial Sequence
  Synthetic sequence
AAAA

SEQ ID NO: 819 - protein, 4 aa, Artificial Sequence
  Synthetic sequence
AAAA

SEQ ID NO: 820 - protein, 4 aa, Artificial Sequence
  Synthetic sequence
AAAA

SEQ ID NO: 821 - protein, 4 aa, Artificial Sequence
  Synthetic sequence
AAAA

SEQ ID NO: 822 - protein, 4 aa, Artificial Sequence
  Synthetic sequence
AAAA

SEQ ID NO: 823 - protein, 4 aa, Artificial Sequence
  Synthetic sequence
AAAA

SEQ ID NO: 824 - protein, 4 aa, Artificial Sequence
  Synthetic sequence
AAAA

SEQ ID NO: 825 - protein, 4 aa, Artificial Sequence
  Synthetic sequence
AAAA

SEQ ID NO: 826 - protein, 4 aa, Artificial Sequence
  Synthetic sequence
AAAA

SEQ ID NO: 827 - RNA, 86 nt, Artificial Sequence
  Synthetic sequence
ggaaccauucaaaacagcauagcaaguuaaaauaaggcuaguccguuaucaacuugaaaaaguggcaccgagucggugcuuuuuuu

SEQ ID NO: 828 - RNA, 67 nt, Artificial Sequence
  Synthetic sequence
uagcaaguuaaaauaaggcuaguccguuaucaacuugaaaaaguggcaccgagucggugcuuuuuuu

SEQ ID NO: 829 - RNA, 88 nt, Streptococcus pyogenes
guuggaaccauucaaaacagcauagcaaguuaaaauaaggcuaguccguuaucaacuugaaaaaguggcaccgagucggugcuuuuuu

SEQ ID NO: 830 - RNA, 93 nt, Listeria innocua
auauuguuaguauucaaaauaacauagcaaguuaaaauaaggcuuuguccguuaucaacuuuuaauuaaguagcgcuguuucggcgcuuuuuu

SEQ ID NO: 831 - RNA, 104 nt, Streptococcus mutans
uguuggaaucauucgaaacaacacagcaaguuaaaauaaggcagugauuuuuaauccaguccguacacaacuugaaaaagugcgcaccgauucggugcuuuuuu

SEQ ID NO: 832 - RNA, 95 nt, Streptococcus thermophilus
uugugguuugaaaccauucgaaacaacacagcgaguuaaaauaaggcuuaguccguacucaacuugaaaagguggcaccgauucgguguuuuuuu

SEQ ID NO: 833 - RNA, 118 nt, Streptococcus thermophilus
uaauaauaguguaagggacgccuuacacaguuacuuaaaucuugcagaagcuacaaagauaaggcuucaugccgaaaucaacacccugucauuuuauggcaggguguuuucguuauuu

SEQ ID NO: 834 - RNA, 112 nt, Neisseria meningitidis
cauauugucgcacugcgaaaugagaaccguugcuacaauaaggccgucugaaaagaugugccgcaacgcucugccccuuaaagcuucugcuuuaaggggcaucguuuauuuc

SEQ ID NO: 835 - RNA, 110 nt, Pasteurella multocida
gcauauuguugcacugcgaaaugagagacguugcuacaauaaggcuucugaaaagaaugaccguaacgcucugccccuugugauucuuaauugcaaggggcaucguuuuu

SEQ ID NO: 836 - RNA, 115 nt, Mycoplasma mobile
uauuauguauuucgaaauacagauguacaguuaagaauacauaagaaugauacaucacuaaaaaaaggcuuuaugccguaacuacuacuuauuuucaaaauaaguaguuuuuuuu

SEQ ID NO: 837 - RNA, 26 nt, Artificial Sequence
  Synthetic sequence
uagcaaguuaaaauaaggcuaguccg

SEQ ID NO: 838 - RNA, 36 nt, Streptococcus pyogenes
uuguuggaaccauucaaaacagcauagcaaguuaaa

SEQ ID NO: 839 - RNA, 36 nt, Streptococcus mutans
guguuggaaucauucgaaacaacacagcaaguuaaa

SEQ ID NO: 840 - RNA, 36 nt, Streptococcus thermophilus
gguuugaaaccauucgaaacaacacagcgaguuaaa

SEQ ID NO: 841 - RNA, 36 nt, Streptococcus thermophilus
cuuacacaguuacuuaaaucuugcagaagcuacaaa

SEQ ID NO: 842 - RNA, 36 nt, Listeria innocua
auauuguuaguauucaaaauaacauagcaaguuaaa

SEQ ID NO: 843 - RNA, 34 nt, Listeria innocua
auuguuaguauucaaaauaacauagcaaguuaaa

SEQ ID NO: 844 - RNA, 36 nt, Treponema denticola
auuuaagauccaucuuaaauuacacaacgaguucaa

SEQ ID NO: 845 - RNA, 36 nt, Neisseria meningitidis
auugucgcacugcgaaaugagaaccguugcuacaau

SEQ ID NO: 846 - RNA, 38 nt, Neisseria meningitidis
auauugucgcacugcgaaaugagaaccguugcuacaau

SEQ ID NO: 847 - RNA, 36 nt, Streptococcus gordonii; identical to SEQ ID NO: 841

SEQ ID NO: 848 - RNA, 36 nt, Bifidobacterium bifidum
augaucaaggucauugaccugacaggcauaaauuga

SEQ ID NO: 849 - RNA, 36 nt, Lactobacillus salivarius
gguuuugaccucauugauuuaacauucugaguugaa

SEQ ID NO: 850 - RNA, 37 nt, Francisella tularensis
guuucaguuguuagauuauuugguauguacuuguguu

SEQ ID NO: 851 - RNA, 37 nt, Francisella tularensis
auuacagagcauuaauuauuugguacauuuauaauuu

SEQ ID NO: 852 - RNA, 37 nt, Legionella pneumophila
auuucaggguaucgaaauuuagaugauuucuaauuua

SEQ ID NO: 853 - RNA, 36 nt, Nitratifractor salsuginis
uguaacaggguaggguuuuuugaggggucuuaaaau

SEQ ID NO: 854 - RNA, 36 nt, Butyrivibrio fibrisolvens
aguuucuaaucacuuaauuuuuucggaccuacuaaa

SEQ ID NO: 855 - RNA, 36 nt, Streptobacillus moniliformis
gauucacauuauucaaguuuacuacagauucuguau

SEQ ID NO: 856 - RNA, 36 nt, Mycoplasma mobile
aguuaagaauacauaagaaugauacaucacuaaaaa

SEQ ID NO: 857 - RNA, 44 nt, Capnocytophaga ochracea
auugugaauugcuuucaaauugugcgacaaaaguagguauaaua

SEQ ID NO: 858 - RNA, 36 nt, Acidovorax ebreus
auugcagcaacggcucucaccccggauaaccacaau

SEQ ID NO: 859 - RNA, 36 nt, Wolinella succinogenes
auagccgcugccuacucagccauuuagcgcagcgac

SEQ ID NO: 860 - RNA, 37 nt, Wolinella succinogenes
uuuguuaaagcuggaugggauuauuauagaguguugc

SEQ ID NO: 861 - RNA, 37 nt, Wolinella succinogenes
uuucaaggcaucgaacggauuugcuauaaaguguugc

SEQ ID NO: 862 - RNA, 36 nt, Prevotella ruminicola
uuuugcacacguaagauuccuacaucuuaucacaau

SEQ ID NO: 863 - RNA, 48 nt, Fibrobacter succinogenes
auugugaauugcuuucagauuaugaaaauaauauaguuaaaauuuuug

SEQ ID NO: 864 - RNA, 36 nt, Campylobacter jejuni
auuuuauuucgauuuuaaucaacccuaaauuucaau

SEQ ID NO: 865 - RNA, 36 nt, Campylobacter jejuni
auuuuagucccuuuuuaaauuucuuaugagauuaua

SEQ ID NO: 866 - RNA, 25 nt, Campylobacter jejuni
aagaaauuuaaaaagggacuaaaau

SEQ ID NO: 867 - RNA, 36 nt, Pasteurella multocida
auuguagcaacgucucucauuucgcagugcaacaau

SEQ ID NO: 868 - RNA, 36 nt, Rhodopseudomonas palustris
gccguggcuuuccuaccgauuucccaccgcaugauu

SEQ ID NO: 869 - RNA, 36 nt, Olsenella uli
ucugaauuaccagucagaacgauacugcgagucaaa

SEQ ID NO: 870 - RNA, 36 nt, Rhodospirillum rubrum
guuccauggccccgucccacacgccaugauagagcg

SEQ ID NO: 871 - RNA, 36 nt, Rhodospirillum rubrum
aaacgggagaaccgucccacacggccaugguagagu

SEQ ID NO: 872 - RNA, 36 nt, Dinoroseobacter shibae
uuaacggcucgaccgcgaauucugaacguaaagaca

SEQ ID NO: 873 - RNA, 36 nt, Verminephrobacter eiseniae
uuagcguccagagcgcauaucccagugagauauccg

SEQ ID NO: 874 - RNA, 75 nt, Streptococcus pyogenes
aaacagcauagcaaguuaaaauaaggcuaguccguuaucaacuugaaaaaguggcaccgagucggugcuuuuuuu

SEQ ID NO: 875 - RNA, 77 nt, Listeria innocua
aaauaacauagcaaguuaaaauaaggcuuuguccguuaucaacuuuuaauuaaguagcgcuguuucggcgcuuuuuu

SEQ ID NO: 876 - RNA, 73 nt, Artificial Sequence
  Synthetic sequence
aacagcauagcaaguuaaaauaaggcuaguccguuaucaacuugaaaaaguggcaccgagucggugcuuuuuu

SEQ ID NO: 877 - RNA, 33 nt, Francisella novicida
uauaaauguaccaaauaauuaaugcucuguaau

SEQ ID NO: 878 - RNA, 74 nt, Campylobacter jejuni
aagaaauuuaaaaagggacuaaaauaaagaguuugcgggacucugcgggguuacaauccccuaaaaccgcuuuu

SEQ ID NO: 879 - RNA, 96 nt, Francisella novicida
aucuaaaauuauaaauguaccaaauaauuaaugcucuguaaucauuuaaaaguauuuugaacggaccucuguuugacacgucugaauaacuaaaaa

SEQ ID NO: 880 - RNA, 109 nt, Streptococcus thermophilus2
uguaagggacgccuuacacaguuacuuaaaucuugcagaagcuacaaagauaaggcuucaugccgaaaucaacacccugucauuuuauggcaggguguuuucguuauuu

SEQ ID NO: 881 - RNA, 110 nt, Mycoplasma mobile
uguauuucgaaauacagauguacaguuaagaauacauaagaaugauacaucacuaaaaaaaggcuuuaugccguaacuacuacuuauuuucaaaauaaguaguuuuuuuu

SEQ ID NO: 882 - RNA, 92 nt, Listeria innocua
auuguuaguauucaaaauaacauagcaaguuaaaauaaggcuuuguccguuaucaacuuuuaauuaaguagcgcuguuucggcgcuuuuuuu

SEQ ID NO: 883 - RNA, 89 nt, Streptococcus pyogenes
guuggaaccauucaaaacagcauagcaaguuaaaauaaggcuaguccguuaucaacuugaaaaaguggcaccgagucggugcuuuuuuu

SEQ ID NO: 884 - RNA, 107 nt, Streptococcus mutans
guuggaaucauucgaaacaacacagcaaguuaaaauaaggcagugauuuuuaauccaguccguacacaacuugaaaaagugcgcaccgauucggugcuuuuuuauuu

SEQ ID NO: 885 - RNA, 96 nt, Streptococcus thermophilus
uugugguuugaaaccauucgaaacaacacagcgaguuaaaauaaggcuuaguccguacucaacuugaaaagguggcaccgauucgguguuuuuuuu

SEQ ID NO: 886 - RNA, 102 nt, Neisseria meningitidis
acauauugucgcacugcgaaaugagaaccguugcuacaauaaggccgucugaaaagaugugccgcaacgcucugccccuuaaagcuucugcuuuaaggggca

SEQ ID NO: 887 - RNA, 110 nt, Pasteurella multocida; identical to SEQ ID NO: 835

SEQ ID NO: 888 - RNA, 37 nt, Francisella novicida
aacacaaguacauaccaaauaaucuaacaacugaaac

SEQ ID NO: 889 - RNA, 37 nt, Francisella novicida
aaauuauaaauguaccaaauaauuaaugcucuguaau

SEQ ID NO: 890 - RNA, 37 nt, Wolinella succinogenes; identical to SEQ ID NO: 861

SEQ ID NO: 891 - RNA, 37 nt, Wolinella succinogenes; identical to SEQ ID NO: 860

SEQ ID NO: 892 - RNA, 37 nt, gamma proteobacterium
auuucaguguauagaauguugggaugcauucugaaua

SEQ ID NO: 893 - RNA, 37 nt, gamma proteobacterium
auaacaagggaguauuugcuggaauaagcucugaaac

SEQ ID NO: 894 - RNA, 37 nt, Sutterella wadsworthensis
guuuccaagcaauagcucguggcguuaugauuucugu

SEQ ID NO: 895 - RNA, 37 nt, Sutterella wadsworthensis
ggugauuuccuauagcucauagcguuaugaucucuaa

SEQ ID NO: 896 - RNA, 37 nt, Legionella pneumophila; identical to SEQ ID NO: 852

SEQ ID NO: 897 - RNA, 36 nt, Listeria innocua; identical to SEQ ID NO: 842

SEQ ID NO: 898 - RNA, 36 nt, Streptococcus thermophilus; identical to SEQ ID NO: 840

SEQ ID NO: 899 - RNA, 36 nt, Streptococcus mutans; identical to SEQ ID NO: 839

SEQ ID NO: 900 - RNA, 36 nt, Streptococcus pyogenes; identical to SEQ ID NO: 838

SEQ ID NO: 901 - RNA, 36 nt, Fusobacterium nucleatum
auuuuuaauuuaaguaauaaaaaauggagcauauac

SEQ ID NO: 902 - RNA, 36 nt, Filifactor alocis
aguugacuaccauaugagauuacacuacacgguuca

SEQ ID NO: 903 - RNA, 36 nt, Treponema denticola; identical to SEQ ID NO: 844

SEQ ID NO: 904 - RNA, 36 nt, Solobacterium moorei
cuuauaccaguaagauaauuuacauaguaaguucaa

SEQ ID NO: 905 - RNA, 36 nt, Veillonella atypica
guuuuggagguuuacagaauuacacuacgaguucaa

SEQ ID NO: 906 - RNA, 36 nt, Finegoldia magna
guuuaauaccuauaugagauuacaucaugaguucaa

SEQ ID NO: 907 - RNA, 36 nt, Olsenella uli; identical to SEQ ID NO: 869

SEQ ID NO: 908 - RNA, 36 nt, Lactobacillus rhamnosus
caacuugaauugauugaucugacaucuacgaguuga

SEQ ID NO: 909 - RNA, 36 nt, Lactobacillus gasseri
ugauuagauuucauugaucuaacagccaucuaaaac

SEQ ID NO: 910 - RNA, 36 nt, Lactobacillus gasseri
acacuaaacuuuauugaucuaacaaccagauuuaaa

SEQ ID NO: 911 - RNA, 36 nt, Oenococcus kitaharae
ggguucuaccucauugaucugacacacagcauugaa

SEQ ID NO: 912 - RNA, 36 nt, Bifidobacterium bifidum; identical to SEQ ID NO: 848

SEQ ID NO: 913 - RNA, 36 nt, Staphylococcus pseudintermedius
guuuuacuucuuucuaaauaaacauaguuaaguuaa

SEQ ID NO: 914 - RNA, 36 nt, Eubacterium rectale
auuuuauagucacguaaauuuuucagaucuacuaaa

SEQ ID NO: 915 - RNA, 38 nt, Enterococcus faecalis
auuuuacugauaagaaauuauugagaaucuacaaaaau

SEQ ID NO: 916 - RNA, 36 nt, Streptococcus thermophilus; identical to SEQ ID NO: 841

SEQ ID NO: 917 - RNA, 36 nt, Staphylococcus lugdunensis
cuuguacuuauaccuaaaauuacagaaucuacugaa

SEQ ID NO: 918 - RNA, 36 nt, Eubacterium dolichum
aucauaaucuagcaaaaguuuauaugaucuaacaaa

SEQ ID NO: 919 - RNA, 36 nt, Mycoplasma mobile; identical to SEQ ID NO: 856

SEQ ID NO: 920 - RNA, 36 nt, Mycoplasma ovipneumoniae
auuuuacucuaguaagaaauugucgcacaaaaauaa

SEQ ID NO: 921 - RNA, 36 nt, Mycoplasma gallisepticum
auuauugcuuacacaauuauugucgugcuaaaauaa

SEQ ID NO: 922 - RNA, 36 nt, Mycoplasma canis
auuauuguuuacccaaauauuguacauccuaaauca

SEQ ID NO: 923 - RNA, 36 nt, Mycoplasma synoviae
uacuuacuuaacaaaauaauuguacgauuccaaaau

SEQ ID NO: 924 - RNA, 36 nt, Aminomonas paucivorans
gccuucccucccugccgaaggagcagauccucuccu

SEQ ID NO: 925 - RNA, 36 nt, Clostridium perfringens
uuauaguaacuaguuaaacucucgauaugcuauacc

SEQ ID NO: 926 - RNA, 36 nt, Clostridium cellulolyticum
auuauagcaacaauucaggcuccgauaugccauaau

SEQ ID NO: 927 - RNA, 36 nt, Acidovorax ebreus; identical to SEQ ID NO: 858

SEQ ID NO: 928 - RNA, 36 nt, Neisseria meningitidis; identical to SEQ ID NO: 845

SEQ ID NO: 929 - RNA, 36 nt, Pasteurella multocida
auuguugcacugcgaaaugagagacguugcuacaau

SEQ ID NO: 930 - RNA, 36 nt, phylotype Rs-D17
uuuguaacuuaucugagagaggaugguuauuauaau

SEQ ID NO: 931 - RNA, 36 nt, Wolinella succinogenes; identical to SEQ ID NO: 859

SEQ ID NO: 932 - RNA, 36 nt, Campylobacter jejuni
auaauacaaaaaucauuuuuuuaaacaaacauaaac

SEQ ID NO: 933 - RNA, 36 nt, Campylobacter jejuni
uauaaucucauaagaaauuuaaaaagggacuaaaau

SEQ ID NO: 934 - RNA, 36 nt, Helicobacter mustelae
guauuugucaauaaauauacuuuauaauggcaagau

SEQ ID NO: 935 - RNA, 36 nt, Roseburia intestinalis
uuguaauaaccuaauuaucacuugguaugauauaau

SEQ ID NO: 936 - RNA, 36 nt, Lactobacillus coryniformis
uuuuauucuauaguaaguuuucagcuaaaauagauc

SEQ ID NO: 937 - RNA, 36 nt, Rhodopseudomonas palustris; identical to SEQ ID NO: 868

SEQ ID NO: 938 - RNA, 36 nt, Cand. Puniceispirillum marinum
uaaccauaggcuccucaaucaccagaguguuauugc

SEQ ID NO: 939 - RNA, 36 nt, Verminephrobacter eiseniae; identical to SEQ ID NO: 873

SEQ ID NO: 940 - RNA, 36 nt, Ralstonia syzygii
guuaguagcaaagcgcaauucccgaucugcuggaaa

SEQ ID NO: 941 - RNA, 36 nt, Azospirillum B510
uuaacggcuggacccccgauccccaucgaauuucca

SEQ ID NO: 942 - RNA, 36 nt, Dinoroseobacter shibae; identical to SEQ ID NO: 872

SEQ ID NO: 943 - RNA, 36 nt, Rhodospirillum rubrum; identical to SEQ ID NO: 870

SEQ ID NO: 944 - RNA, 36 nt, Rhodospirillum rubrum; identical to SEQ ID NO: 871

SEQ ID NO: 945 - RNA, 36 nt, Spirochaeta Buddy
auuagagauaaucgcugguuuuuguuaagauauaac

SEQ ID NO: 946 - RNA, 36 nt, Prevotella ruminicola; identical to SEQ ID NO: 862

SEQ ID NO: 947 - RNA, 36 nt, Flavobacterium columnare
agauaaaauuauucuaaucuuuaaucuuaucacaau

SEQ ID NO: 948 - RNA, 36 nt, Parvibaculum lavamentivorans
cuugcgaaaagcgaccgccucucgauuugcuacaga

SEQ ID NO: 949 - RNA, 44 nt, Capnocytophaga ochracea; identical to SEQ ID NO: 857

SEQ ID NO: 950 - RNA, 48 nt, Fibrobacter succinogenes; identical to SEQ ID NO: 863

SEQ ID NO: 951 - RNA, 36 nt, Nitratifractor salsuginis; identical to SEQ ID NO: 853

SEQ ID NO: 952 - RNA, 36 nt, Akkermansia muciniphila
cuuauacgggaacuccacgauaaggcauuuuacaug

SEQ ID NO: 953 - RNA, 88 nt, Artificial Sequence
  Synthetic sequence
uuggaaccauucaaaacagcauagcaaguuaaaauaaggcuaguccguuaucaacuugaaaaaguggcaccgagucggugcuuuuuuu

SEQ ID NO: 954 - RNA, 77 nt, Artificial Sequence
  Synthetic sequence
caaaacagcauagcaaguuaaaauaaggcuaguccguuaucaacuugaaaaaguggcaccgagucggugcuuuuuuu

SEQ ID NO: 955 - RNA, 61 nt, Artificial Sequence
  Synthetic sequence
caaaacagcauagcaaguuaaaauaaggcuaguccguuaucaacuugaaaaaguuuuuuuu

SEQ ID NO: 956 - RNA, 44 nt, Artificial Sequence
  Synthetic sequence
caaaacagcauagcaaguuaaaauaaggcuaguccguuuuuuuu

SEQ ID NO: 957 - RNA, 72 nt, Artificial Sequence
  Synthetic sequence
caaaacagcauagcaaguuaaaauaaggcuaguccgguucacugccguauaggcagcuaagaaauuuuuuuu

SEQ ID NO: 958 - RNA, 82 nt, Artificial Sequence
  Synthetic sequence
guuuuagagcuagaaauagcaaguuaaaauaaggcuaguccguuaucaacuugaaaaaguggcaccgagucggugcuuuuuu

SEQ ID NO: 959 - RNA, 102 nt, Artificial Sequence
  Synthetic sequence
  misc_feature (1)..(80): The Ns in these positions can be present or absent and the total number of Ns can be vaiable (e.g., see specification). N can be any nucleotide.
nnnnnnnnnnnnnnnnnnnnnnnnnnnnnnnnnnnnnnnnnnnnnnnnnnnnnnnnnnnnnnnnnnnnnnnnnnnnnnnnguuuuagagcuaugcuguuuug

SEQ ID NO: 960 - RNA, 102 nt, Artificial Sequence
  Synthetic sequence
  misc_feature (1)..(80): The Ns in these positions can be present or absent and the total number of Ns can be vaiable (e.g., see specification). N can be any nucleotide.
nnnnnnnnnnnnnnnnnnnnnnnnnnnnnnnnnnnnnnnnnnnnnnnnnnnnnnnnnnnnnnnnnnnnnnnnnnnnnnnnguuuuagagcuauguuauuuug

SEQ ID NO: 961 - RNA, 92 nt, exemplary
  misc_feature (1)..(80): The Ns in these positions can be present or absent and the total number of Ns can be vaiable (e.g., see specification). N can be any nucleotide.
nnnnnnnnnnnnnnnnnnnnnnnnnnnnnnnnnnnnnnnnnnnnnnnnnnnnnnnnnnnnnnnnnnnnnnnnnnnnnnnnguuuuagagcua

SEQ ID NO: 962 - RNA, 152 nt, Artificial Sequence
  Synthetic sequence
  misc_feature (37)..(116): The Ns in these positions can be present or absent and the total number of Ns can be vaiable (e.g., see specification). N can be any nucleotide.
guuuuagagcuaugcuguuuugaauggucccaaaacnnnnnnnnnnnnnnnnnnnnnnnnnnnnnnnnnnnnnnnnnnnnnnnnnnnnnnnnnnnnnnnnnnnnnnnnnnnnnnnnguuuuagagcuaugcuguuuugaauggucccaaaac

SEQ ID NO: 963 - RNA, 188 nt, Artificial Sequence
  Synthetic sequence
  misc_feature (37)..(116): The Ns in these positions can be present or absent and the total number of Ns can be vaiable (e.g., see specification). N can be any nucleotide.
guuuuagagcuaugcuguuuugaauggucccaaaacnnnnnnnnnnnnnnnnnnnnnnnnnnnnnnnnnnnnnnnnnnnnnnnnnnnnnnnnnnnnnnnnnnnnnnnnnnnnnnnnguuuuagagcuaugcuguuuugaauggucccaaaacguuuuagagcuaugcuguuuugaauggucccaaaac

SEQ ID NO: 964 - RNA, 22 nt, exemplary
guuuuagagcuaugcuguuuug

SEQ ID NO: 965 - RNA, 36 nt, Streptococcus pyogenes
guuuuagagcuaugcuguuuugaauggucccaaaac

SEQ ID NO: 966 - RNA, 36 nt, Pasteurella multocida
guuguaguucccucucucauuucgcagugcuacaau

SEQ ID NO: 967 - RNA, 36 nt, Mycoplasma mobile
guuuugguguaguaucauucuuauguauucuuaaac

SEQ ID NO: 968 - RNA, 37 nt, Francisella novicida
guuucaguugcugaauuauuugguaaacuacuguuag

SEQ ID NO: 969 - RNA, 33 nt, Francisella novicida
guuucaguugcugaauuauuugguaaacuacug

SEQ ID NO: 970 - RNA, 36 nt, Streptococcus mutans
guuuuagagcuguguuguuucgaaugguuccaaaac

SEQ ID NO: 971 - RNA, 36 nt, Streptococcus thermophilus; identical to SEQ ID NO: 970

SEQ ID NO: 972 - RNA, 36 nt, Streptococcus thermophilus
guuuuuguacucucaagauuuaaguaacuguacaac

SEQ ID NO: 973 - RNA, 36 nt, Listeria innocua
guuuuagagcuauguuauuuugaaugcuaacaaaac

SEQ ID NO: 974 - RNA, 36 nt, Treponema denticola
guuugagaguuguguaauuuaagauggaucucaaac

SEQ ID NO: 975 - RNA, 36 nt, Neisseria meningitidis
guuguagcucccuuucucauuucgcagugcuacaau

SEQ ID NO: 976 - RNA, 36 nt, Streptococcus gordonii; identical to SEQ ID NO: 972

SEQ ID NO: 977 - RNA, 35 nt, Bifidobacterium bifidum
guuucaaugccugucagaucaaugacuuugaccac

SEQ ID NO: 978 - RNA, 36 nt, Lactobacillus salivarius
guuucagaaguauguuaaaucaauaagguuaagacc

SEQ ID NO: 979 - RNA, 37 nt, Francisella novicida
cuaacaguaguuuaccaaauaauucagcaacugaaac

SEQ ID NO: 980 - RNA, 37 nt, Francisella novicida; identical to SEQ ID NO: 979

SEQ ID NO: 981 - RNA, 37 nt, Legionella pneumophila
ccaauaaucccucaucuaaaaauccaaccacugaaac

SEQ ID NO: 982 - RNA, 36 nt, Nitratifractor salsuginis
guuuuaagaccccucaaaaccccacccuguuacaau

SEQ ID NO: 983 - RNA, 36 nt, Butyrivibrio fibrisolvens
guuuuaguacccgggaaaauuaagugauuggaaaac

SEQ ID NO: 984 - RNA, 36 nt, Streptobacillus moniliformis
gauacagauucuugguaaauuugaauaaugugaaug

SEQ ID NO: 985 - RNA, 36 nt, Mycoplasma mobile; identical to SEQ ID NO: 967

SEQ ID NO: 986 - RNA, 44 nt, Capnocytophaga ochracea
uguuaucaaucgcaaaacuacaaaauuugaaagcaauucacaac

SEQ ID NO: 987 - RNA, 36 nt, Acidovorax ebreus
aguguagcuauccggggugagagagggagcuacaac

SEQ ID NO: 988 - RNA, 36 nt, Wolinella succinogenes
auuauagcgaggaauggcugaguaggcggcuauaac

SEQ ID NO: 989 - RNA, 37 nt, Wolinella succinogenes
gcaacacuuuauagcaaauccgcuuagccugugaaac

SEQ ID NO: 990 - RNA, 37 nt, Wolinella succinogenes; identical to SEQ ID NO: 989

SEQ ID NO: 991 - RNA, 36 nt, Prevotella ruminicola
guugugguuugauguaggaaaggaaugauauacaac

SEQ ID NO: 992 - RNA, 48 nt, Fibrobacter succinogenes
guuguuauugcacuaguaaaacuagaaaaucugaaagcaauucacaac

SEQ ID NO: 993 - RNA, 36 nt, Campylobacter jejuni
auuuuaccauaaagaaauuuaaaaagggacuaaaac

SEQ ID NO: 994 - RNA, 36 nt, Campylobacter jejuni
guuuuagucccuuuuuaaauuucuuuaugguaaaau

SEQ ID NO: 995 - RNA, 36 nt, Pasteurella multocida
auuguagcacugcgaaaugagagagggaacuacaac

SEQ ID NO: 996 - RNA, 36 nt, Rhodopseudomonas palustris
agccuaccacggggaaaucgguagggaagccacggc

SEQ ID NO: 997 - RNA, 36 nt, Olsenella uli
guuuuggggcagugucguuuugacugguaaucaaac

SEQ ID NO: 998 - RNA, 36 nt, Rhodospirillum rubrum
acucuaccauggcggugugggacggggccauggaac

SEQ ID NO: 999 - RNA, 36 nt, Rhodospirillum rubrum; identical to SEQ ID NO: 998

SEQ ID NO: 1000 - RNA, 36 nt, Dinoroseobacter shibae
aguuuagcuguucagaauucgggguccagccgcaac

SEQ ID NO: 1001 - RNA, 36 nt, Verminephrobacter eiseniae
auuguagcucacugggauaugcgcacuggccggaac

SEQ ID NO: 1002 - RNA, 37 nt, Francisella novicida; identical to SEQ ID NO: 968

SEQ ID NO: 1003 - RNA, 37 nt, Francisella novicida; identical to SEQ ID NO: 968

SEQ ID NO: 1004 - RNA, 37 nt, Wolinella succinogenes; identical to SEQ ID NO: 989

SEQ ID NO: 1005 - RNA, 37 nt, Wolinella succinogenes; identical to SEQ ID NO: 989

SEQ ID NO: 1006 - RNA, 37 nt, gamma proteobacterium
guuucagagcuuaucccaacaaaccaacagcugaaac

SEQ ID NO: 1007 - RNA, 37 nt, gamma proteobacterium; identical to SEQ ID NO: 1006

SEQ ID NO: 1008 - RNA, 37 nt, Sutterella wadsworthensis
gcgaagaucauaacgcuacgagcuauagcacugaaac

SEQ ID NO: 1009 - RNA, 37 nt, Sutterella wadsworthensis; identical to SEQ ID NO: 1008

SEQ ID NO: 1010 - RNA, 37 nt, Legionella pneumophila; identical to SEQ ID NO: 981

SEQ ID NO: 1011 - RNA, 36 nt, Listeria innocua; identical to SEQ ID NO: 973

SEQ ID NO: 1012 - RNA, 36 nt, Streptococcus thermophilus; identical to SEQ ID NO: 970

SEQ ID NO: 1013 - RNA, 36 nt, Streptococcus mutans; identical to SEQ ID NO: 970

SEQ ID NO: 1014 - RNA, 36 nt, Streptococcus pyogenes; identical to SEQ ID NO: 965

SEQ ID NO: 1015 - RNA, 36 nt, Fusobacterium nucleatum
guuugagaguaauguuauuuuaaauagauucaaaac

SEQ ID NO: 1016 - RNA, 36 nt, Filifactor alocis
guuugagaguaguguaauuucauaugguagucaaac

SEQ ID NO: 1017 - RNA, 36 nt, Treponema denticola; identical to SEQ ID NO: 974

SEQ ID NO: 1018 - RNA, 36 nt, Solobacterium moorei
guuugagaacuauguaaauuaugcugguagcaaaac

SEQ ID NO: 1019 - RNA, 36 nt, Veillonella atypica
guuugcgaguaguguaauucuguaaaucucuaaaac

SEQ ID NO: 1020 - RNA, 36 nt, Finegoldia magna
guuugagaaugauguaauuucauauagguauuaaac

SEQ ID NO: 1021 - RNA, 36 nt, Olsenella uli; identical to SEQ ID NO: 997

SEQ ID NO: 1022 - RNA, 36 nt, Lactobacillus rhamnosus
gucucagguagaugucagaucaaucaguucaagagc

SEQ ID NO: 1023 - RNA, 36 nt, Lactobacillus gasseri
guuuuagaugguuguuagaucaauaagguuuagauc

SEQ ID NO: 1024 - RNA, 36 nt, Lactobacillus gasseri; identical to SEQ ID NO: 1023

SEQ ID NO: 1025 - RNA, 36 nt, Oenococcus kitaharae
gcuucagaugugugucagaucaaugagguagaaccc

SEQ ID NO: 1026 - RNA, 36 nt, Bifidobacterium bifidum
guuucagaugccugucagaucaaugacuuugaccac

SEQ ID NO: 1027 - RNA, 36 nt, Staphylococcus pseudintermedius
guuuuagcacuauguuuauuuagaaagagguaaaac

SEQ ID NO: 1028 - RNA, 36 nt, Eubacterium rectale
auuuuaguaacugaauaauuuacgugacuguaaaac

SEQ ID NO: 1029 - RNA, 36 nt, Enterococcus faecalis
guuuuuguauucucaauaauuucuuaucaguaaaac

SEQ ID NO: 1030 - RNA, 36 nt, Streptococcus thermophilus; identical to SEQ ID NO: 972

SEQ ID NO: 1031 - RNA, 36 nt, Staphylococcus lugdunensis
guuuuaguacucuguaauuuuagguauaagugauac

SEQ ID NO: 1032 - RNA, 36 nt, Eubacterium dolichum
guuuuguuaccauauggauuuuugcuagauuaagac

SEQ ID NO: 1033 - RNA, 36 nt, Mycoplasma mobile; identical to SEQ ID NO: 967

SEQ ID NO: 1034 - RNA, 36 nt, Mycoplasma ovipneumoniae
guuuuugugcuguacaauuucuuacuagaguaaaac

SEQ ID NO: 1035 - RNA, 36 nt, Mycoplasma gallisepticum
guuuuagcacuguacaauacuuguguaagcaauaac

SEQ ID NO: 1036 - RNA, 36 nt, Mycoplasma canis
guuuuaguguuguacaauauuuggguaaacaauaac

SEQ ID NO: 1037 - RNA, 36 nt, Mycoplasma synoviae
guuuugggguuguacaauuauuuuguuaaguaaaac

SEQ ID NO: 1038 - RNA, 36 nt, Aminomonas paucivorans
agcauagcauuucggagugcggcagggagcuaugac

SEQ ID NO: 1039 - RNA, 36 nt, Clostridium perfringens
auuauagcauaucgagaauuuacuaggaacuauaac

SEQ ID NO: 1040 - RNA, 36 nt, Clostridium cellulolyticum
auuauagcauaucggagccugaauuggagcuauaac

SEQ ID NO: 1041 - RNA, 36 nt, Acidovorax ebreus; identical to SEQ ID NO: 987

SEQ ID NO: 1042 - RNA, 36 nt, Neisseria meningitidis; identical to SEQ ID NO: 975

SEQ ID NO: 1043 - RNA, 36 nt, Pasteurella multocida; identical to SEQ ID NO: 966

SEQ ID NO: 1044 - RNA, 36 nt, phylotype Rs-D17
guuauaguuuccuuccucucucagaugugcuauaau

SEQ ID NO: 1045 - RNA, 36 nt, Wolinella succinogenes; identical to SEQ ID NO: 988

SEQ ID NO: 1046 - RNA, 36 nt, Campylobacter jejuni; identical to SEQ ID NO: 994

SEQ ID NO: 1047 - RNA, 36 nt, Campylobacter jejuni; identical to SEQ ID NO: 994

SEQ ID NO: 1048 - RNA, 36 nt, Helicobacter mustelae
auuuuagcauaaacauauuuaugaaguggcuaaaac

SEQ ID NO: 1049 - RNA, 36 nt, Roseburia intestinalis
auuauaccauaccaagugauaacagggaauuacaac

SEQ ID NO: 1050 - RNA, 36 nt, Lactobacillus coryniformis
gaucuauuuuagcugaaaacugaaggaaucaauagc

SEQ ID NO: 1051 - RNA, 36 nt, Rhodopseudomonas palustris; identical to SEQ ID NO: 996

SEQ ID NO: 1052 - RNA, 36 nt, Cand. Puniceispirillum marinum
aguauagcacucuggugauugagagccuagagcaac

SEQ ID NO: 1053 - RNA, 36 nt, Verminephrobacter eiseniae; identical to SEQ ID NO: 1001

SEQ ID NO: 1054 - RNA, 36 nt, Ralstonia syzygii
agguuagcagaucgggaauugcgcucuggcuacaac

SEQ ID NO: 1055 - RNA, 36 nt, Azospirillum B510
aguguagccgauggggaucggggguccagccgcaac

SEQ ID NO: 1056 - RNA, 36 nt, Dinoroseobacter shibae; identical to SEQ ID NO: 1000

SEQ ID NO: 1057 - RNA, 36 nt, Rhodospirillum rubrum; identical to SEQ ID NO: 998

SEQ ID NO: 1058 - RNA, 36 nt, Rhodospirillum rubrum; identical to SEQ ID NO: 998

SEQ ID NO: 1059 - RNA, 36 nt, Spirochaeta Buddy
ggucaaucuuaacaaaaaucagcggucauccccaac

SEQ ID NO: 1060 - RNA, 36 nt, Prevotella ruminicola; identical to SEQ ID NO: 991

SEQ ID NO: 1061 - RNA, 36 nt, Flavobacterium columnare
guugugguuugauuaaagauuagaaaacacgauauu

SEQ ID NO: 1062 - RNA, 36 nt, Parvibaculum lavamentivorans
agaguagcaaaucgagagacggccgcaauccgcagc

SEQ ID NO: 1063 - RNA, 44 nt, Capnocytophaga ochracea; identical to SEQ ID NO: 986

SEQ ID NO: 1064 - RNA, 48 nt, Fibrobacter succinogenes; identical to SEQ ID NO: 992

SEQ ID NO: 1065 - RNA, 36 nt, Nitratifractor salsuginis; identical to SEQ ID NO: 982

SEQ ID NO: 1066 - RNA, 36 nt, Akkermansia muciniphila
guuguacugugccuuauuuuggauucaaggcaaaac

SEQ ID NO: 1067 - RNA, 44 nt, Artificial Sequence
  Synthetic sequence
guuuuagagcuagaaauagcaaguuaaaauaaggcuaguccguu

SEQ ID NO: 1068 - RNA, 60 nt, Artificial Sequence
  Synthetic sequence
  misc_feature (13)..(17): n is a, c, g, or u
guuuuagagcuannnnnuagcaaguuaaaauaaguuaaaauaaggcuaguccguuaucaa

SEQ ID NO: 1069 - RNA, 68 nt, Artificial Sequence
  Synthetic sequence
guuuuagagcuaugcugaaaagcauagcaaguuaaaaauaaguuaaaauaaggcuaguccguuaucaa

SEQ ID NO: 1070 - RNA, 69 nt, Artificial Sequence
  Synthetic sequence
guuuuagagcuaugcuguuuuggaaacaaaacagcauagcaaguuaaaauaaggcuaguccguuaucaa

SEQ ID NO: 1071 - RNA, 70 nt, Artificial Sequence
  Synthetic sequence
guuuuagagcuaguuuuagagcuagaaauagcaaguuaaaauuagcaaguuaaaauaaggcuaguccguu

SEQ ID NO: 1072 - RNA, 70 nt, Artificial Sequence
  Synthetic sequence
guuuuagagcuauagcaaguuaaaaugaaaguuuuagagcuauagcaaguuaaaauaaggcuaguccguu

SEQ ID NO: 1073 - RNA, 74 nt, Artificial Sequence
  Synthetic sequence
guuuuagagcuagaaauagcaaguuaaaauguuuuagagcuagaaauagcaaguuaaaauaaggcuaguccguu

SEQ ID NO: 1074 - RNA, 119 nt, Artificial Sequence
  Synthetic sequence
guuuuagagcuaugcuguuuuggaaacaaaacagcauagcaaguuaaaauguuuuagagcuaugcuguuuuggaaacaaaacagcauagcaaguuaaaauaaggcuaguccguuaucaa

SEQ ID NO: 1075 - RNA, 12 nt, Artificial Sequence
  Synthetic sequence
guuuuagagcua

SEQ ID NO: 1076 - protein, 11 aa, Artificial Sequence
  Synthetic sequence
YGRKKRRQRRR

SEQ ID NO: 1077 - protein, 12 aa, Artificial Sequence
  Synthetic sequence
RRQRRTSKLMKR

SEQ ID NO: 1078 - protein, 27 aa, Artificial Sequence
  Synthetic sequence
GWTLNSAGYLLGKINLKALAALAKKIL

SEQ ID NO: 1079 - protein, 33 aa, Artificial Sequence
  Synthetic sequence
KALAWEAKLAKALAKALAKHLAKALAKALKCEA

SEQ ID NO: 1080 - protein, 16 aa, Artificial Sequence
  Synthetic sequence
RQIKIWFQNRRMKWKK

SEQ ID NO: 1081 - protein, 11 aa, Artificial Sequence
  Synthetic sequence
YGRKKRRQRRR

SEQ ID NO: 1082 - protein, 9 aa, Artificial Sequence
  Synthetic sequence
RKKRRQRRR

SEQ ID NO: 1083 - protein, 11 aa, Artificial Sequence
  Synthetic sequence
YGRKKRRQRRR

SEQ ID NO: 1084 - protein, 8 aa, Artificial Sequence
  Synthetic sequence
RKKRRQRR

SEQ ID NO: 1085 - protein, 11 aa, Artificial Sequence
  Synthetic sequence
YARAAARQARA

SEQ ID NO: 1086 - protein, 11 aa, Artificial Sequence
  Synthetic sequence
THRLPRRRRRR

SEQ ID NO: 1087 - protein, 11 aa, Artificial Sequence
  Synthetic sequence
GGRRARRRRRR

SEQ ID NO: 1088 - protein, 1300 aa, Francisella  tularensis
MSIYQEFVNKYSLSKTLRFELIPQGKTLENIKARGLILDDEKRAKDYKKAKQIIDKYHQFFIEEILSSVCISEDLLQNYSDVYFKLKKSDDDNLQKDFKSAKDTIKKQISEYIKDSEKFKNLFNQNLIDAKKGQESDLILWLKQSKDNGIELFKANSDITDIDEALEIIKSFKGWTTYFKGFHENRKNVYSSNDIPTSIIYRIVDDNLPKFLENKAKYESLKDKAPEAINYEQIKKDLAEELTFDIDYKTSEVNQRVFSLDEVFEIANFNNYLNQSGITKFNTIIGGKFVNGENTKRKGINEYINLYSQQINDKTLKKYKMSVLFKQILSDTESKSFVIDKLEDDSDVVTTMQSFYEQIAAFKTVEEKSIKETLSLLFDDLKAQKLDLSKIYFKNDKSLTDLSQQVFDDYSVIGTAVLEYITQQIAPKNLDNPSKKEQELIAKKTEKAKYLSLETIKLALEEFNKHRDIDKQCRFEEILANFAAIPMIFDEIAQNKDNLAQISIKYQNQGKKDLLQASAEDDVKAIKDLLDQTNNLLHKLKIFHISQSEDKANILDKDEHFYLVFEECYFELANIVPLYNKIRNYITQKPYSDEKFKLNFENSTLANGWDKNKEPDNTAILFIKDDKYYLGVMNKKNNKIFDDKAIKENKGEGYKKIVYKLLPGANKMLPKVFFSAKSIKFYNPSEDILRIRNHSTHTKNGSPQKGYEKFEFNIEDCRKFIDFYKQSISKHPEWKDFGFRFSDTQRYNSIDEFYREVENQGYKLTFENISESYIDSVVNQGKLYLFQIYNKDFSAYSKGRPNLHTLYWKALFDERNLQDVVYKLNGEAELFYRKQSIPKKITHPAKEAIANKNKDNPKKESVFEYDLIKDKRFTEDKFFFHCPITINFKSSGANKFNDEINLLLKEKANDVHILSIDRGERHLAYYTLVDGKGNIIKQDTFNIIGNDRMKTNYHDKLAAIEKDRDSARKDWKKINNIKEMKEGYLSQVVHEIAKLVIEYNAIVVFEDLNFGFKRGRFKVEKQVYQKLEKMLIEKLNYLVFKDNEFDKTGGVLRAYQLTAPFETFKKMGKQTGIIYYVPAGFTSKICPVTGFVNQLYPKYESVSKSQEFFSKFDKICYNLDKGYFEFSFDYKNFGDKAAKGKWTIASFGSRLINFRNSDKNHNWDTREVYPTKELEKLLKDYSIEYGHGECIKAAICGESDKKFFAKLTSVLNTILQMRNSKTGTELDYLISPVADVNGNFFDSRQAPKNMPQDADANGAYHIGLKGLMLLGRIKNNQEGKKLNLVIKNEEYFEFVQNRNN

SEQ ID NO: 1089 - protein, 1307 aa, unknown
  Synthetic sequence
MTQFEGFTNLYQVSKTLRFELIPQGKTLKHIQEQGFIEEDKARNDHYKELKPIIDRIYKTYADQCLQLVQLDWENLSAAIDSYRKEKTEETRNALIEEQATYRNAIHDYFIGRTDNLTDAINKRHAEIYKGLFKAELFNGKVLKQLGTVTTTEHENALLRSFDKFTTYFSGFYENRKNVFSAEDISTAIPHRIVQDNFPKFKENCHIFTRLITAVPSLREHFENVKKAIGIFVSTSIEEVFSFPFYNQLLTQTQIDLYNQLLGGISREAGTEKIKGLNEVLNLAIQKNDETAHIIASLPHRFIPLFKQILSDRNTLSFILEEFKSDEEVIQSFCKYKTLLRNENVLETAEALFNELNSIDLTHIFISHKKLETISSALCDHWDTLRNALYERRISELTGKITKSAKEKVQRSLKHEDINLQEIISAAGKELSEAFKQKTSEILSHAHAALDQPLPTTLKKQEEKEILKSQLDSLLGLYHLLDWFAVDESNEVDPEFSARLTGIKLEMEPSLSFYNKARNYATKKPYSVEKFKLNFQMPTLASGWDVNKEKNNGAILFVKNGLYYLGIMPKQKGRYKALSFEPTEKTSEGFDKMYYDYFPDAAKMIPKCSTQLKAVTAHFQTHTTPILLSNNFIEPLEITKEIYDLNNPEKEPKKFQTAYAKKTGDQKGYREALCKWIDFTRDFLSKYTKTTSIDLSSLRPSSQYKDLGEYYAELNPLLYHISFQRIAEKEIMDAVETGKLYLFQIYNKDFAKGHHGKPNLHTLYWTGLFSPENLAKTSIKLNGQAELFYRPKSRMKRMAHRLGEKMLNKKLKDQKTPIPDTLYQELYDYVNHRLSHDLSDEARALLPNVITKEVSHEIIKDRRFTSDKFFFHVPITLNYQAANSPSKFNQRVNAYLKEHPETPIIGIDRGERNLIYITVIDSTGKILEQRSLNTIQQFDYQKKLDNREKERVAARQAWSVVGTIKDLKQGYLSQVIHEIVDLMIHYQAVVVLENLNFGFKSKRTGIAEKAVYQQFEKMLIDKLNCLVLKDYPAEKVGGVLNPYQLTDQFTSFAKMGTQSGFLFYVPAPYTSKIDPLTGFVDPFVWKTIKNHESRKHFLEGFDFLHYDVKTGDFILHFKMNRNLSFQRGLPGFMPAWDIVFEKNETQFDAKGTPFIAGKRIVPVIENHRFTGRYRDLYPANELIALLEEKGIVFRDGSNILPKLLENDDSHAIDTMVALIRSVLQMRNSNAATGEDYINSPVRDLNGVCFDSRFQNPEWPMDADANGAYHIALKGQLLLNHLKESKDLKLQNGISNQDWLAYIQELRN

SEQ ID NO: 1090 - protein, 1246 aa, unknown
  Synthetic sequence
MLKNVGIDRLDVEKGRKNMSKLEKFTNCYSLSKTLRFKAIPVGKTQENIDNKRLLVEDEKRAEDYKGVKKLLDRYYLSFINDVLHSIKLKNLNNYISLFRKKTRTEKENKELENLEINLRKEIAKAFKGNEGYKSLFKKDIIETILPEFLDDKDEIALVNSFNGFTTAFTGFFDNRENMFSEEAKSTSIAFRCINENLTRYISNMDIFEKVDAIFDKHEVQEIKEKILNSDYDVEDFFEGEFFNFVLTQEGIDVYNAIIGGFVTESGEKIKGLNEYINLYNQKTKQKLPKFKPLYKQVLSDRESLSFYGEGYTSDEEVLEVFRNTLNKNSEIFSSIKKLEKLFKNFDEYSSAGIFVKNGPAISTISKDIFGEWNVIRDKWNAEYDDIHLKKKAVVTEKYEDDRRKSFKKIGSFSLEQLQEYADADLSVVEKLKEIIIQKVDEIYKVYGSSEKLFDADFVLEKSLKKNDAVVAIMKDLLDSVKSFENYIKAFFGEGKETNRDESFYGDFVLAYDILLKVDHIYDAIRNYVTQKPYSKDKFKLYFQNPQFMGGWDKDKETDYRATILRYGSKYYLAIMDKKYAKCLQKIDKDDVNGNYEKINYKLLPGPNKMLPKVFFSKKWMAYYNPSEDIQKIYKNGTFKKGDMFNLNDCHKLIDFFKDSISRYPKWSNAYDFNFSETEKYKDIAGFYREVEEQGYKVSFESASKKEVDKLVEEGKLYMFQIYNKDFSDKSHGTPNLHTMYFKLLFDENNHGQIRLSGGAELFMRRASLKKEELVVHPANSPIANKNPDNPKKTTTLSYDVYKDKRFSEDQYELHIPIAINKCPKNIFKINTEVRVLLKHDDNPYVIGIDRGERNLLYIVVVDGKGNIVEQYSLNEIINNFNGIRIKTDYHSLLDKKEKERFEARQNWTSIENIKELKAGYISQVVHKICELVEKYDAVIALEDLNSGFKNSRVKVEKQVYQKFEKMLIDKLNYMVDKKSNPCATGGALKGYQITNKFESFKSMSTQNGFIFYIPAWLTSKIDPSTGFVNLLKTKYTSIADSKKFISSFDRIMYVPEEDLFEFALDYKNFSRTDADYIKKWKLYSYGNRIRIFRNPKKNNVFDWEEVCLTSAYKELFNKYGINYQQGDIRALLCEQSDKAFYSSFMALMSLMLQMRNSITGRTDVDFLISPVKNSDGIFYDSRNYEAQENAILPKNADANGAYNIARKVLWAIGQFKKAEDEKLDKVKIAISNKEWLEYAQTSVKH

SEQ ID NO: 1091 - protein, 1246 aa, Porphyromonas macacae
MKTQHFFEDFTSLYSLSKTIRFELKPIGKTLENIKKNGLIRRDEQRLDDYEKLKKVIDEYHEDFIANILSSFSFSEEILQSYIQNLSESEARAKIEKTMRDTLAKAFSEDERYKSIFKKELVKKDIPVWCPAYKSLCKKFDNFTTSLVPFHENRKNLYTSNEITASIPYRIVHVNLPKFIQNIEALCELQKKMGADLYLEMMENLRNVWPSFVKTPDDLCNLKTYNHLMVQSSISEYNRFVGGYSTEDGTKHQGINEWINIYRQRNKEMRLPGLVFLHKQILAKVDSSSFISDTLENDDQVFCVLRQFRKLFWNTVSSKEDDAASLKDLFCGLSGYDPEAIYVSDAHLATISKNIFDRWNYISDAIRRKTEVLMPRKKESVERYAEKISKQIKKRQSYSLAELDDLLAHYSEESLPAGFSLLSYFTSLGGQKYLVSDGEVILYEEGSNIWDEVLIAFRDLQVILDKDFTEKKLGKDEEAVSVIKKALDSALRLRKFFDLLSGTGAEIRRDSSFYALYTDRMDKLKGLLKMYDKVRNYLTKKPYSIEKFKLHFDNPSLLSGWDKNKELNNLSVIFRQNGYYYLGIMTPKGKNLFKTLPKLGAEEMFYEKMEYKQIAEPMLMLPKVFFPKKTKPAFAPDQSVVDIYNKKTFKTGQKGFNKKDLYRLIDFYKEALTVHEWKLFNFSFSPTEQYRNIGEFFDEVREQAYKVSMVNVPASYIDEAVENGKLYLFQIYNKDFSPYSKGIPNLHTLYWKALFSEQNQSRVYKLCGGGELFYRKASLHMQDTTVHPKGISIHKKNLNKKGETSLFNYDLVKDKRFTEDKFFFHVPISINYKNKKITNVNQMVRDYIAQNDDLQIIGIDRGERNLLYISRIDTRGNLLEQFSLNVIESDKGDLRTDYQKILGDREQERLRRRQEWKSIESIKDLKDGYMSQVVHKICNMVVEHKAIVVLENLNLSFMKGRKKVEKSVYEKFERMLVDKLNYLVVDKKNLSNEPGGLYAAYQLTNPLFSFEELHRYPQSGILFFVDPWNTSLTDPSTGFVNLLGRINYTNVGDARKFFDRFNAIRYDGKGNILFDLDLSRFDVRVETQRKLWTLTTFGSRIAKSKKSGKWMVERIENLSLCFLELFEQFNIGYRVEKDLKKAILSQDRKEFYVRLIYLFNLMMQIRNSDGEEDYILSPALNEKNLQFDSRLIEAKDLPVDADANGAYNVARKGLMVVQRIKRGDHESIHRIGRAQWLRYVQEGIVE

SEQ ID NO: 1092 - protein, 1326 aa, Prevotella  disiens
MKVMENYQEFTNLFQLNKTLRFELKPIGKTCELLEEGKIFASGSFLEKDKVRADNVSYVKKEIDKKHKIFIEETLSSFSISNDLLKQYFDCYNELKAFKKDCKSDEEEVKKTALRNKCTSIQRAMREAISQAFLKSPQKKLLAIKNLIENVFKADENVQHFSEFTSYFSGFETNRENFYSDEEKSTSIAYRLVHDNLPIFIKNIYIFEKLKEQFDAKTLSEIFENYKLYVAGSSLDEVFSLEYFNNTLTQKGIDNYNAVIGKIVKEDKQEIQGLNEHINLYNQKHKDRRLPFFISLKKQILSDREALSWLPDMFKNDSEVIKALKGFYIEDGFENNVLTPLATLLSSLDKYNLNGIFIRNNEALSSLSQNVYRNFSIDEAIDANAELQTFNNYELIANALRAKIKKETKQGRKSFEKYEEYIDKKVKAIDSLSIQEINELVENYVSEFNSNSGNMPRKVEDYFSLMRKGDFGSNDLIENIKTKLSAAEKLLGTKYQETAKDIFKKDENSKLIKELLDATKQFQHFIKPLLGTGEEADRDLVFYGDFLPLYEKFEELTLLYNKVRNRLTQKPYSKDKIRLCFNKPKLMTGWVDSKTEKSDNGTQYGGYLFRKKNEIGEYDYFLGISSKAQLFRKNEAVIGDYERLDYYQPKANTIYGSAYEGENSYKEDKKRLNKVIIAYIEQIKQTNIKKSIIESISKYPNISDDDKVTPSSLLEKIKKVSIDSYNGILSFKSFQSVNKEVIDNLLKTISPLKNKAEFLDLINKDYQIFTEVQAVIDEICKQKTFIYFPISNVELEKEMGDKDKPLCLFQISNKDLSFAKTFSANLRKKRGAENLHTMLFKALMEGNQDNLDLGSGAIFYRAKSLDGNKPTHPANEAIKCRNVANKDKVSLFTYDIYKNRRYMENKFLFHLSIVQNYKAANDSAQLNSSATEYIRKADDLHIIGIDRGERNLLYYSVIDMKGNIVEQDSLNIIRNNDLETDYHDLLDKREKERKANRQNWEAVEGIKDLKKGYLSQAVHQIAQLMLKYNAIIALEDLGQMFVTRGQKIEKAVYQQFEKSLVDKLSYLVDKKRPYNELGGILKAYQLASSITKNNSDKQNGFLFYVPAWNTSKIDPVTGFTDLLRPKAMTIKEAQDFFGAFDNISYNDKGYFEFETNYDKFKIRMKSAQTRWTICTFGNRIKRKKDKNYWNYEEVELTEEFKKLFKDSNIDYENCNLKEEIQNKDNRKFFDDLIKLLQLTLQMRNSDDKGNDYIISPVANAEGQFFDSRNGDKKLPLDADANGAYNIARKGLWNIRQIKQTKNDKKLNLSISSTEWLDFVREKPYLK

SEQ ID NO: 1093 - RNA, 19 nt, Artificial Sequence
  Synthetic sequence
aauuucuacuguuguagau

SEQ ID NO: 1094 - RNA, 19 nt, Artificial Sequence
  Synthetic sequence
aauuucugcuguugcagau

SEQ ID NO: 1095 - RNA, 19 nt, Artificial Sequence
  Synthetic sequence
aauuuccacuguuguggau

SEQ ID NO: 1096 - RNA, 19 nt, Artificial Sequence
  Synthetic sequence
aauuccuacuguuguaggu

SEQ ID NO: 1097 - RNA, 19 nt, Artificial Sequence
  Synthetic sequence
aauuucuacuauuguagau

SEQ ID NO: 1098 - RNA, 19 nt, Artificial Sequence
  Synthetic sequence
aauuucuacugcuguagau

SEQ ID NO: 1099 - RNA, 18 nt, Artificial Sequence
  Synthetic sequence
aauuucuacuuuguagau

SEQ ID NO: 1100 - RNA, 17 nt, Artificial Sequence
  Synthetic sequence
aauuucuacuuguagau

SEQ ID NO: 1101 - RNA, 67 nt, Artificial Sequence
  Synthetic sequence
gaauuuuucaacgggugugccaauggccacuuuccagguggcaaagcccguugagcuucucaaaaag

SEQ ID NO: 1102 - RNA, 79 nt, Artificial Sequence
  Synthetic sequence
gucuagaggacagaauuuuucaacgggugugccaauggccacuuuccagguggcaaagcccguugagcuucucaaaaag

SEQ ID NO: 1103 - RNA, 78 nt, Artificial Sequence
  Synthetic sequence
ucuagaggacagaauuuuucaacgggugugccaauggccacuuuccagguggcaaagcccguugagcuucucaaaaag

SEQ ID NO: 1104 - RNA, 36 nt, Artificial Sequence
  Synthetic sequence
acuuuccaggcaaagcccguugagcuucucaaaaag

SEQ ID NO: 1105 - RNA, 9 nt, Artificial Sequence
  Synthetic sequence
agcuucuca

SEQ ID NO: 1106 - RNA, 8 nt, Artificial Sequence
  Synthetic sequence
gcuucuca

SEQ ID NO: 1107 - RNA, 34 nt, Artificial Sequence
  Synthetic sequence
  misc_feature (15)..(34): n is a, c, g, or u
cugagaaguggcacnnnnnnnnnnnnnnnnnnnn

SEQ ID NO: 1108 - RNA, 14 nt, Artificial Sequence
  Synthetic sequence
cugagaaguggcac

SEQ ID NO: 1109 - RNA, 9 nt, Artificial Sequence
  Synthetic sequence
cugagaagu

SEQ ID NO: 1110 - RNA, 13 nt, Artificial Sequence
  Synthetic sequence
ugagaaguggcac

SEQ ID NO: 1111 - RNA, 8 nt, Artificial Sequence
  Synthetic sequence
ugagaagu

SEQ ID NO: 1112 - protein, 1129 aa, Alicyclobacillus acidoterrestris
MAVKSIKVKLRLDDMPEIRAGLWKLHKEVNAGVRYYTEWLSLLRQENLYRRSPNGDGEQECDKTAEECKAELLERLRARQVENGHRGPAGSDDELLQLARQLYELLVPQAIGAKGDAQQIARKFLSPLADKDAVGGLGIAKAGNKPRWVRMREAGEPGWEEEKEKAETRKSADRTADVLRALADFGLKPLMRVYTDSEMSSVEWKPLRKGQAVRTWDRDMFQQAIERMMSWESWNQRVGQEYAKLVEQKNRFEQKNFVGQEHLVHLVNQLQQDMKEASPGLESKEQTAHYVTGRALRGSDKVFEKWGKLAPDAPFDLYDAEIKNVQRRNTRRFGSHDLFAKLAEPEYQALWREDASFLTRYAVYNSILRKLNHAKMFATFTLPDATAHPIWTRFDKLGGNLHQYTFLFNEFGERRHAIRFHKLLKVENGVAREVDDVTVPISMSEQLDNLLPRDPNEPIALYFRDYGAEQHFTGEFGGAKIQCRRDQLAHMHRRRGARDVYLNVSVRVQSQSEARGERRPPYAAVFRLVGDNHRAFVHFDKLSDYLAEHPDDGKLGSEGLLSGLRVMSVDLGLRTSASISVFRVARKDELKPNSKGRVPFFFPIKGNDNLVAVHERSQLLKLPGETESKDLRAIREERQRTLRQLRTQLAYLRLLVRCGSEDVGRRERSWAKLIEQPVDAANHMTPDWREAFENELQKLKSLHGICSDKEWMDAVYESVRRVWRHMGKQVRDWRKDVRSGERPKIRGYAKDVVGGNSIEQIEYLERQYKFLKSWSFFGKVSGQVIRAEKGSRFAITLREHIDHAKEDRLKKLADRIIMEALGYVYALDERGKGKWVAKYPPCQLILLEELSEYQFNNDRPPSENNQLMQWSHRGVFQELINQAQVHDLLVGTMYAAFSSRFDARTGAPGIRCRRVPARCTQEHNPEPFPWWLNKFVVEHTLDACPLRADDLIPTGEGEIFVSPFSAEEGDFHQIHADLNAAQNLQQRLWSDFDISQIRLRCDWGEVDGELVLIPRLTGKRTADSYSNKVFYTNTGVTYYERERGKKRRKVFAQEKLSEEEAELLVEADEAREKSVVLMRDPSGIINRGNWTRQKEFWSMVNQRIEGYLVKQIRSRVPLQDSACENTGDI

SEQ ID NO: 1113 - protein, 872 aa, Alicyclobacillus contaminans
MGFNTAELLRKVEEEMRKTSVGFDTDNPFAHRITRRAIRGWDRIAEAWRRLPPDAPESEYIEAFKDIQRKNPRKIGSEPLFKNLAAPGVRSELLNNPQVLITFAKYNELQRQLAKAKQFAQKTLPHPVFHPVWVRYDKLGGNLHHYQIEPAVHANDTHKVKFSSLLLPQEDGSYAEVKDVTVSLAPSLQFPTGLVHPKVTTPPRTGLVTVMDEEAGKPVVCYRDRGHDALVPVAFGGAKLQFNRAHLSAGYRKGVLSAGGGGSIYFNVTLDVQVPNERDVSKTFSFSRDRDLVSLKAEELKRYMETKPLGMPGVRVMSVDLGVRYGAAISVFEVKPFAEVRKDKLHYPITGCEGFVAEHERSVILKLPGEGVRTAGKQSERKQALAAIRAEMSILRKWLRVSQVTEEDRAKAVRGLLEDERGGGWTMDPGEDSDHQPLQQFLHEARLAVGELVNLVHLSPAEWERAVIERHRRLERITASHIRVFQTMRKVWGKRRNEDAAHTGGISLAHIEHLIQQRKLFIRWSTHARTYGEVRRLPKHEGFAKRLQKHTNHVKEDRIKKLADMIVMAARGYRFLDKRARWVKTRHAPCDLILFEDLSRYRFTMDRPPTENSQLMNWSHRELLKTVKMQAALFGIGVGTVPAAFTSRFDAQTGAPGLRCKRVTKQDKEKTPFWLIQFAEITGVNVTNVEPGQLIPVDGGEWFVSPKGPRAADGLKCVHADINAAHNLQRRFWIPRLPSVKCRRYVEAEGFAAVPSSTAFMKVHGKGAFVSVDGEFYEYQKGRRVAVNRADRTSSTLDEDEGDIGEEMLVSSNGAGEFVRMFYDESGYVGYGRWMDSKVFWGKVRQIVHRAIQDQVEKRAAARGENGATSSR

SEQ ID NO: 1114 - protein, 1149 aa, Desulfovibrio inopinatus
MPTRTINLKLVLGKNPENATLRRALFSTHRLVNQATKRIEEFLLLCRGEAYRTVDNEGKEAEIPRHAVQEEALAFAKAAQRHNGCISTYEDQEILDVLRQLYERLVPSVNENNEAGDAQAANAWVSPLMSAESEGGLSVYDKVLDPPPVWMKLKEEKAPGWEAASQIWIQSDEGQSLLNKPGSPPRWIRKLRSGQPWQDDFVSDQKKKQDELTKGNAPLIKQLKEMGLLPLVNPFFRHLLDPEGKGVSPWDRLAVRAAVAHFISWESWNHRTRAEYNSLKLRRDEFEAASDEFKDDFTLLRQYEAKRHSTLKSIALADDSNPYRIGVRSLRAWNRVREEWIDKGATEEQRVTILSKLQTQLRGKFGDPDLFNWLAQDRHVHLWSPRDSVTPLVRINAVDKVLRRRKPYALMTFAHPRFHPRWILYEAPGGSNLRQYALDCTENALHITLPLLVDDAHGTWIEKKIRVPLAPSGQIQDLTLEKLEKKKNRLYYRSGFQQFAGLAGGAEVLFHRPYMEHDERSEESLLERPGAVWFKLTLDVATQAPPNWLDGKGRVRTPPEVHHFKTALSNKSKHTRTLQPGLRVLSVDLGMRTFASCSVFELIEGKPETGRAFPVADERSMDSPNKLWAKHERSFKLTLPGETPSRKEEEERSIARAEIYALKRDIQRLKSLLRLGEEDNDNRRDALLEQFFKGWGEEDVVPGQAFPRSLFQGLGAAPFRSTPELWRQHCQTYYDKAEACLAKHISDWRKRTRPRPTSREMWYKTRSYHGGKSIWMLEYLDAVRKLLLSWSLRGRTYGAINRQDTARFGSLASRLLHHINSLKEDRIKTGADSIVQAARGYIPLPHGKGWEQRYEPCQLILFEDLARYRFRVDRPRRENSQLMQWNHRAIVAETTMQAELYGQIVENTAAGFSSRFHAATGAPGVRCRFLLERDFDNDLPKPYLLRELSWMLGNTKVESEEEKLRLLSEKIRPGSLVPWDGGEQFATLHPKRQTLCVIHADMNAAQNLQRRFFGRCGEAFRLVCQPHGDDVLRLASTPGARLLGALQQLENGQGAFELVRDMGSTSQMNRFVMKSLGKKKIKPLQDNNGDDELEDVLSVLPEEDDTGRITVFRDSSGIFFPCNVWIPAKQFWPAVRAMIWKVMASHSLG

SEQ ID NO: 1115 - protein, 1194 aa, Desulfonatronum thiodismutans
MVLGRKDDTAELRRALWTTHEHVNLAVAEVERVLLRCRGRSYWTLDRRGDPVHVPESQVAEDALAMAREAQRRNGWPVVGEDEEILLALRYLYEQIVPSCLLDDLGKPLKGDAQKIGTNYAGPLFDSDTCRRDEGKDVACCGPFHEVAGKYLGALPEWATPISKQEFDGKDASHLRFKATGGDDAFFRVSIEKANAWYEDPANQDALKNKAYNKDDWKKEKDKGISSWAVKYIQKQLQLGQDPRTEVRRKLWLELGLLPLFIPVFDKTMVGNLWNRLAVRLALAHLLSWESWNHRAVQDQALARAKRDELAALFLGMEDGFAGLREYELRRNESIKQHAFEPVDRPYVVSGRALRSWTRVREEWLRHGDTQESRKNICNRLQDRLRGKFGDPDVFHWLAEDGQEALWKERDCVTSFSLLNDADGLLEKRKGYALMTFADARLHPRWAMYEAPGGSNLRTYQIRKTENGLWADVVLLSPRNESAAVEEKTFNVRLAPSGQLSNVSFDQIQKGSKMVGRCRYQSANQQFEGLLGGAEILFDRKRIANEQHGATDLASKPGHVWFKLTLDVRPQAPQGWLDGKGRPALPPEAKHFKTALSNKSKFADQVRPGLRVLSVDLGVRSFAACSVFELVRGGPDQGTYFPAADGRTVDDPEKLWAKHERSFKITLPGENPSRKEEIARRAAMEELRSLNGDIRRLKAILRLSVLQEDDPRTEHLRLFMEAIVDDPAKSALNAELFKGFGDDRFRSTPDLWKQHCHFFHDKAEKVVAERFSRWRTETRPKSSSWQDWRERRGYAGGKSYWAVTYLEAVRGLILRWNMRGRTYGEVNRQDKKQFGTVASALLHHINQLKEDRIKTGADMIIQAARGFVPRKNGAGWVQVHEPCRLILFEDLARYRFRTDRSRRENSRLMRWSHREIVNEVGMQGELYGLHVDTTEAGFSSRYLASSGAPGVRCRHLVEEDFHDGLPGMHLVGELDWLLPKDKDRTANEARRLLGGMVRPGMLVPWDGGELFATLNAASQLHVIHADINAAQNLQRRFWGRCGEAIRIVCNQLSVDGSTRYEMAKAPKARLLGALQQLKNGDAPFHLTSIPNSQKPENSYVMTPTNAGKKYRAGPGEKSSGEEDELALDIVEQAEELAQGRKTFFRDPSGVFFAPDRWLPSEIYWSRIRRRIWQVTLERNSSGRQERAEMDEMPY

SEQ ID NO: 1116 - protein, 1132 aa, Tuberibacillus calidus
MATKSFILKMKTKNNPQLRLSLWKTHELFNFGVAYYMDLLSLFRQKDLYMHNDEDPDHPVVLKKEEIQERLWMKVRETQQKNGFHGEVSKDEVLETLRALYEELVPSAVGKSGEANQISNKYLYPLTDPASQSGKGTANSGRKPRWKKLKEAGDPSWKDAYEKWEKERQEDPKLKILAALQSFGLIPLFRPFTENDHKAVISVKWMPKSKNQSVRKFDKDMFNQAIERFLSWESWNEKVAEDYEKTVSIYESLQKELKGISTKAFEIMERVEKAYEAHLREITFSNSTYRIGNRAIRGWTEIVKKWMKLDPSAPQGNYLDVVKDYQRRHPRESGDFKLFELLSRPENQAAWREYPEFLPLYVKYRHAEQRMKTAKKQATFTLCDPIRHPLWVRYEERSGTNLNKYRLIMNEKEKVVQFDRLICLNADGHYEEQEDVTVPLAPSQQFDDQIKFSSEDTGKGKHNFSYYHKGINYELKGTLGGARIQFDREHLLRRQGVKAGNVGRIFLNVTLNIEPMQPFSRSGNLQTSVGKALKVYVDGYPKVVNFKPKELTEHIKESEKNTLTLGVESLPTGLRVMSVDLGQRQAAAISIFEVVSEKPDDNKLFYPVKDTDLFAVHRTSFNIKLPGEKRTERRMLEQQKRDQAIRDLSRKLKFLKNVLNMQKLEKTDEREKRVNRWIKDREREEENPVYVQEFEMISKVLYSPHSVWVDQLKSIHRKLEEQLGKEISKWRQSISQGRQGVYGISLKNIEDIEKTRRLLFRWSMRPENPGEVKQLQPGERFAIDQQNHLNHLKDDRIKKLANQIVMTALGYRYDGKRKKWIAKHPACQLVLFEDLSRYAFYDERSRLENRNLMRWSRREIPKQVAQIGGLYGLLVGEVGAQYSSRFHAKSGAPGIRCRVVKEHELYITEGGQKVRNQKFLDSLVENNIIEPDDARRLEPGDLIRDQGGDKFATLDERGELVITHADINAAQNLQKRFWTRTHGLYRIRCESREIKDAVVLVPSDKDQKEKMENLFGIGYLQPFKQENDVYKWVKGEKIKGKKTSSQSDDKELVSEILQEASVMADELKGNRKTLFRDPSGYVFPKDRWYTGGRYFGTLEHLLKRKLAERRLFDGGSSRRGLFNGTDSNTNVE

SEQ ID NO: 1117 - protein, 1108 aa, Bacillus thermoamylovorans
MATRSFILKIEPNEEVKKGLWKTHEVLNHGIAYYMNILKLIRQEAIYEHHEQDPKNPKKVSKAEIQAELWDFVLKMQKCNSFTHEVDKDVVFNILRELYEELVPSSVEKKGEANQLSNKFLYPLVDPNSQSGKGTASSGRKPRWYNLKIAGDPSWEEEKKKWEEDKKKDPLAKILGKLAEYGLIPLFIPFTDSNEPIVKEIKWMEKSRNQSVRRLDKDMFIQALERFLSWESWNLKVKEEYEKVEKEHKTLEERIKEDIQAFKSLEQYEKERQEQLLRDTLNTNEYRLSKRGLRGWREIIQKWLKMDENEPSEKYLEVFKDYQRKHPREAGDYSVYEFLSKKENHFIWRNHPEYPYLYATFCEIDKKKKDAKQQATFTLADPINHPLWVRFEERSGSNLNKYRILTEQLHTEKLKKKLTVQLDRLIYPTESGGWEEKGKVDIVLLPSRQFYNQIFLDIEEKGKHAFTYKDESIKFPLKGTLGGARVQFDRDHLRRYPHKVESGNVGRIYFNMTVNIEPTESPVSKSLKIHRDDFPKFVNFKPKELTEWIKDSKGKKLKSGIESLEIGLRVMSIDLGQRQAAAASIFEVVDQKPDIEGKLFFPIKGTELYAVHRASFNIKLPGETLVKSREVLRKAREDNLKLMNQKLNFLRNVLHFQQFEDITEREKRVTKWISRQENSDVPLVYQDELIQIRELMYKPYKDWVAFLKQLHKRLEVEIGKEVKHWRKSLSDGRKGLYGISLKNIDEIDRTRKFLLRWSLRPTEPGEVRRLEPGQRFAIDQLNHLNALKEDRLKKMANTIIMHALGYCYDVRKKKWQAKNPACQIILFEDLSNYNPYEERSRFENSKLMKWSRREIPRQVALQGEIYGLQVGEVGAQFSSRFHAKTGSPGIRCSVVTKEKLQDNRFFKNLQREGRLTLDKIAVLKEGDLYPDKGGEKFISLSKDRKLVTTHADINAAQNLQKRFWTRTHGFYKVYCKAYQVDGQTVYIPESKDQKQKIIEEFGEGYFILKDGVYEWGNAGKLKIKKGSSKQSSSELVDSDILKDSFDLASELKGEKLMLYRDPSGNVFPSDKWMAAGVFFGKLERILISKLTNQYSISTIEDDSSKQSM

SEQ ID NO: 1118 - protein, 1108 aa, unknown
  Synthetic sequence
MAIRSIKLKLKTHTGPEAQNLRKGIWRTHRLLNEGVAYYMKMLLLFRQESTGERPKEELQEELICHIREQQQRNQADKNTQALPLDKALEALRQLYELLVPSSVGQSGDAQIISRKFLSPLVDPNSEGGKGTSKAGAKPTWQKKKEANDPTWEQDYEKWKKRREEDPTASVITTLEEYGIRPIFPLYTNTVTDIAWLPLQSNQFVRTWDRDMLQQAIERLLSWESWNKRVQEEYAKLKEKMAQLNEQLEGGQEWISLLEQYEENRERELRENMTAANDKYRITKRQMKGWNELYELWSTFPASASHEQYKEALKRVQQRLRGRFGDAHFFQYLMEEKNRLIWKGNPQRIHYFVARNELTKRLEEAKQSATMTLPNARKHPLWVRFDARGGNLQDYYLTAEADKPRSRRFVTFSQLIWPSESGWMEKKDVEVELALSRQFYQQVKLLKNDKGKQKIEFKDKGSGSTFNGHLGGAKLQLERGDLEKEEKNFEDGEIGSVYLNVVIDFEPLQEVKNGRVQAPYGQVLQLIRRPNEFPKVTTYKSEQLVEWIKASPQHSAGVESLASGFRVMSIDLGLRAAAATSIFSVEESSDKNAADFSYWIEGTPLVAVHQRSYMLRLPGEQVEKQVMEKRDERFQLHQRVKFQIRVLAQIMRMANKQYGDRWDELDSLKQAVEQKKSPLDQTDRTFWEGIVCDLTKVLPRNEADWEQAVVQIHRKAEEYVGKAVQAWRKRFAADERKGIAGLSMWNIEELEGLRKLLISWSRRTRNPQEVNRFERGHTSHQRLLTHIQNVKEDRLKQLSHAIVMTALGYVYDERKQEWCAEYPACQVILFENLSQYRSNLDRSTKENSTLMKWAHRSIPKYVHMQAEPYGIQIGDVRAEYSSRFYAKTGTPGIRCKKVRGQDLQGRRFENLQKRLVNEQFLTEEQVKQLRPGDIVPDDSGELFMTLTDGSGSKEVVFLQADINAAHNLQKRFWQRYNELFKVSCRVIVRDEEEYLVPKTKSVQAKLGKGLFVKKSDTAWKDVYVWDSQAKLKGKTTFTEESESPEQLEDFQEIIEEAEEAKGTYRTLFRDPSGVFFPESVWYPQKDFWGEVKRKLYGKLRERFLTKAR

SEQ ID NO: 1119 - protein, 658 aa, Methylobacterium nodulans
MLTKQDKQQKITYCTNMNEVFEAKLGSADLLLNWDHLRGRIRDRVDAGDIGSAFLKLALDVAHVLPDGVDDQLARAAFHFQSAKGAKSKHADSVQAGLRVLSIDLGVRSFATCSVFELKDTAPTTGVAFPLAEFRLWAVHERSFTLELPGENVGAAGQQWRAQADAELRQLRGGLNRHRQLLRAATVQKGERDAYLTDLREAWSAKELWPFEASLLSELERCSTVADPLWQDTCKRAARLYRTEFGAVVSEWRSRTRSREDRKYAGKSMWSVQHLTDVRRFLQSWSLAGRASGDIRRLDRERGGVFAKDLLDHIDALKDDRLKTGADLIVQAARGFQRNEFGYWVQKHAPCHVILFEDLSRYRMRTDRPRRENSQLMQWAHRGVPDMVGMQGEIYGIQDRRDPDSARKHARQPLAAFCLDTPAAFSSRYHASTMTPGIRCHPLRKREFEDQGFLELLKRENEGLDLNGYKPGDLVPLPGGEVFVCLNANGLSRIHADINAAQNLQRRFWTQHGDAFRLPCGKSAVQGQIRWAPLSMGKRQAGALGGFGYLEPTGHDSGSCQWRKTTEAEWRRLSGAQKDRDEAAAAEDEELQGLEEELLERSGERVVFFRDPSGVVLPTDLWFPSAAFWSIVRAKTVGRLRSHLDAQAEASYAVAAGL

SEQ ID NO: 1120 - protein, 1302 aa, unknown
  Synthetic sequence
MKKFELKQNFRNNYSGKTLRNFRQTLAQIANKKSSDSILTIKFKLDCSKTGKLPKYENLISLYDTIEDIKKGTLSYYLFTLIVSGFKFFGSASQAKAFSTKDIFKDNDFYNQFKIQSHLDLPDFVPSKIYQRLKKNVRSTNGKDNAFKASVIVAEYRKEIGKLKNKDESSEHQCEELFKKIGTALETRFSSWQDLINNCSTGCEIIDEILNDSFGTLPSIKKMVLASTTQSSDGEQDGIAIAYDPDSTFIKSDELLNPYFAVATILKSMPPEIQQDKKSAYVKANLTTPTHNALSWIFGKGLTLFQTESTEKLCAMFNVSDKRVIEQVQDAAKAVKLPAELDLNHCTLKFQDFRSSLGGHLDSWTTNYLKRLDELNDLLLNLPKNLSLPDIFMIDGKDFIEYSGCNRDEIQQMIDFVVNEQNRIKLQESLNALLGKGNNQICSDDISTVKDFSEIVNSLHSFVQQIDNSLEQSSNEANSIFSELKKKIEKNEKWDIWKNNLKKIPKLNKLSGGVPDAWKEIREIEQKFHEISENQKKHFTEVMEWIDAGNGTIDIFESRFKYDELLKKSKKNNLQSADELAFRSVLNKLGRFARQGNDLVCEKIKNWFKEQNIFDSSKDFNRYFINQKGFIFKHPSSKKDNSPYNLSANLLEKRYEVTNTVGALLEQCESDPAIVNDPFSMRSLVEFRALWFSINISGISKEQHIPTKIAQPKLDDSTYQESVSPTLKYRLEKEQITSSELNSIFTVYKSLLSGLSIRLSRNSFYLRTKFSWIGNNSLIYCPKETTWKIPAAYFKSDLWNEYKDKQILIVNEEYDVDVVKTFESVYKIVKSKDNNEKNRILPLLKQLPHDWMFKLPFGASNAEKCKVLKLEKNNKKFKPLSVSKDSLARLSGPSTYFNQIDEIMMNDESELSEMTLLADEPVRQQMSNGKIEIIPDDYVMSLAIPITRSLKKGNTESFPFKNIVSIDQGEAGFAYAVFKLSDCGNERAEPIATGLIPIPSIRRLIHSVKKYRGKKQRIQNFNQKFDSTMFTLRENVTGDICGLIVALMKKYNAFPILEKQVGNLESGSKQLMLVYKAVNSKFLAAKVDMQNDQRRSWWYQGNSWNTPILRISNPNQSNNKNIVKNINGKKYEELKIYPGYSVSAYMTSCICHVCGRNALELLKNDDSTGKVKKYQINQDGEVTIGGEVIKLYRKPDRLTPVKNLAKKGNRERTYASINERAPTVSVQKAELSADELQKIIKKNMRRAPRSLMSKDTTQSRYFCVFKNCPCHNKEQHADVNAAINIGRRFLKDCILDDNKEKD

SEQ ID NO: 1121 - protein, 1255 aa, unknown
  Synthetic sequence
MRSNYHGGRNARQWRKQISGLARRTKETVFTYKFPLETDAAEIDFDKAVQTYGIAEGVGHGSLIGLVCAFHLSGFRLFSKAGEAMAFRNRSRYPTDAFAEKLSAIMGIQLPTLSPEGLDLIFQSPPRSRDGIAPVWSENEVRNRLYTNWTGRGPANKPDEHLLEIAGEIAKQVFPKFGGWDDLASDPDKALAAADKYFQSQGDFPSIASLPAAIMLSPANSTVDFEGDYIAIDPAAETLLHQAVSRCAARLGRERPDLDQNKGPFVSSLQDALVSSQNNGLSWLFGVGFQHWKEKSPKELIDEYKVPADQHGAVTQVKSFVDAIPLNPLFDTTHYGEFRASVAGKVRSWVANYWKRLLDLKSLLATTEFTLPESISDPKAVSLFSGLLVDPQGLKKVADSLPARLVSAEEAIDRLMGVGIPTAADIAQVERVADEIGAFIGQVQQFNNQVKQKLENLQDADDEEFLKGLKIELPSGDKEPPAINRISGGAPDAAAEISELEEKLQRLLDARSEHFQTISEWAEENAVTLDPIAAMVELERLRLAERGATGDPEEYALRLLLQRIGRLANRVSPVSAGSIRELLKPVFMEEREFNLFFHNRLGSLYRSPYSTSRHQPFSIDVGKAKAIDWIAGLDQISSDIEKALSGAGEALGDQLRDWINLAGFAISQRLRGLPDTVPNALAQVRCPDDVRIPPLLAMLLEEDDIARDVCLKAFNLYVSAINGCLFGALREGFIVRTRFQRIGTDQIHYVPKDKAWEYPDRLNTAKGPINAAVSSDWIEKDGAVIKPVETVRNLSSTGFAGAGVSEYLVQAPHDWYTPLDLRDVAHLVTGLPVEKNITKLKRLTNRTAFRMVGASSFKTHLDSVLLSDKIKLGDFTIIIDQHYRQSVTYGGKVKISYEPERLQVEAAVPVVDTRDRTVPEPDTLFDHIVAIDLGERSVGFAVFDIKSCLRTGEVKPIHDNNGNPVVGTVAVPSIRRLMKAVRSHRRRRQPNQKVNQTYSTALQNYRENVIGDVCNRIDTLMERYNAFPVLEFQIKNFQAGAKQLEIVYGSVLHRYTFSGVDAHKAKRREYWYNGELWEHPYLMAKKWNEETNSMSGAPKPVSLFPGVTVNAARTSQICHQCQRNPMSHLRGLTGTIEISSDGLLELDDGTIRLFETSDYDEDKFKQSRREKRRLDANVLLSGRHRAEYIYTVAKRNLRRPPKNVMTKDTTQSRYTCLYKNCSWTGHADENAAINIGRRYLAERIDMPASKTKAAV

SEQ ID NO: 1122 - protein, 1266 aa, unknown
  Synthetic sequence
MRPRFHGGMNARDWRKHVGVLAQQHKETTRTYTFPLDTTGSAIDFDAALQAYNAVEGVGYGSLLGLACAVHLSGFRLFSTGKEAATFRNRARYPNAAFQAALRKELGTTITTLTPETLDRLFSSRPKRRNGVPLPWNQDSIRDRLYTNWVKPRPGDTPDAVLFQIATGIAQEITEDVSSWTDLAKNSDRGLKAAHRYFARVGGFPAFDNLTPPATVQPTDTTIDYDPNAPFHLVSHADQTLIHQSISLCAHRIRQEDPALDPNKSGFIKQLQNNFLSQTFYGLSWLFGAGYVHFRECTANDLAIQYGIPNNCRDGIHQIKSFADAILPNTFFEKKHYRKDSRSVGKKAKSWISNYWQRLLQLQTWVDDHTWVTLPQELTEAQFKPLFRGLLVDAVELMAIAERLPQRLADCRDSLDCLMGKGPQAATKNDVEIVEKVREEIESFVGQIEQLGNQLRHQLENENNDQVHRDNLHQLKNRLPLDLRRPQALNKISGGVPDVAKSIRGLETQLDQVLKERRSHFGRLTKWAKECGITLDPLQPLIESEKQRVAERGSAHDAKELAIRLLLQRIGRLGHRLSPTNATAIQELLRPVFAVKREFNLFFHNHMGALYRSPYSTSRHQPFQINVDVAHGTDWIGTIETLIQNLFTQIQDDALLRDLVQLEGFVFSHKLRALPGVIPSELARPNNLQQMGLPALLLVLLQADQVHRETVLRVFNLYGSAINGYLFQALRPGFIVRAGFQRLETKKLRYVPKAQSWQYPDRLHHAKSAIKNSLSAGWIKKNHQGAILPQKTLTALVKQKSLKDTGVPEYLVQAPHDWYVPIDLRGPAIPIEGLTVGTEGPELTQLGPMKDDCAFRAIGPSSFKSKIDAGLLPQDVKYGDMTLIFDQHYQQSISFANGTFSIQYQPTSLQVKAAIPVVDKRPRDTRNNSHLYDRIVAIDLGERKIGYAIFDLKQVLKSEQLEPMREDGKPLIGSISIRSIRGLMKAVQTHRNRRQPNYRIDQTYSKALMHYRESVIGDVCNAIDTLCARYGGFPVLESSVRNFEVGSAQLKTVYGSVSRRYTWSAVDAHKNQRQQYWLGGTKDKIPIWTHPYLMTREWDEKNSKWSNRSKPLKMHPGVEVHPAGTSQICHQCKRNPIGALWNVADTVVLDDQGQLDLDDGTIRLNSGYIDTTEIKRARRKKIRLPENKPLTGSHKTSHVRAVARRNLRQPPKSTRAKDTTQSRYTCLYVDCGHECHADENAAINIGRKYLQERIHIEASRQALSTR

SEQ ID NO: 1123 - protein, 1269 aa, unknown
  Synthetic sequence
MVAGLKKIKRDGVTMKSNYHGGVKARAWRKRIGGLARRQKETVFTYKFPLETEEAGIDFDKAVQTYGIAEGISQGSLIGLVCAFHLSGFRLFSKADETKAFCNQGRYPNQAFAEKLRNELSVTLPKLSPQSLDVLFQSSPKSKNGVAPEWSKNAIRNRLYTNWTGKGAGTNPDEHLLEIAEDIAAEIDSDLDGWKDLEEHPEKGLSAADRYFQAQGDFPSLTGLPPSVPLTPQNSTVAFEGDPVCLNPSDNTLLHQAVARCAGRILQEQPNLSPDKNRFINQLQDELVSSQNNGLSWLFGVGFKYWKEMSVDQLADDYKVKSTDLDALKQVKSFIDAIPLNPLFDTPHYGEFRASVAGKMRSWVKNYWKRLLDLKSQLGTANINLPEGLDEQRAENLFSGLLIDSKGLRQVTDKLPSRLKKAEDTIDRLMGDGNPTSDDIEQVETVAAEISAFIGQVEQFNNQLEQRLENPLEGDDETFLKQLKIDLPAEFKKPPAINRISGGSPDPTAEIAELEEKLDRLMSARKEHYETIAEWASANKVTLDPMEAMTTLEAQRLTERGAEGDQEEFALRLLLQRIGRLANRLSPQGATAIRDLLRPVFTEKREFNLFFHNRMGSLYRSPYSTSRHQPFTIDVAVAKNTDWMDALDGIAETIMKGLSQAGDELSLRLRDWINISGFSLSQRLRGLPDTVPGELALVRSADDVRIPPMLALQLEEDEVSREVCLKAFNLYVSAINGCLFRALREGFIVRTKFQRLERDVLSYVPKTKLWNYPQRLDTARGPIHSALAAAWINKEGSVIDPVETVTALSDTGFSDDGIPEYLVQAPHDWYTPIDLRDISKPVSGLPVKKNITGLKRQKKQTAFRMVGPSSFKSHLDSTLLSEEVKLGDFTLIFDQYYKQRVSYNGRVKITFEPDRLHVEAAVPVIDKRVRPSTEEDALFDHLLAIDLGEKRVGYAVYDIKACLRTGDIKPLEDGDGKPIVGSVAVPSIRRLMKAVRSHRQQRQPNQKVNQTYSTALMNYRENVIGDVCNRIDTLMEKYNAFPVLESSVMNFEAGSRQLEMVYGSVLHRYTYSKIDAHTAKRKEYWYTGEYWDHPYLMAHKWNERTRSYSGSLSALTLYPGVMVHPAGTSQRCHQCKRNPMVEIKQLTGQVEINADGSLELDDGTICLYEGYDYSPEEYKKAKREKRRLDPNVPLSGRHQAKHVSAVAKRNLRRPTVSMMSGDTTQARYVCLYTDCDFTGHADENAAINIGWKYLTERIALSESKDKAGV

SEQ ID NO: 1124 - protein, 1340 aa, unknown
  Synthetic sequence
MQISKVNHKHVAVGQKDRERITGFIYNDPVGDEKSLEDVVAKRANDTKVLFNVFNTKDLYDSQESDKSEKDKEIISKGAKFVAKSFNSAITILKKQNKIYSTLTSQQVIKELKDKFGGARIYDDDIEEALTETLKKSFRKENVRNSIKVLIENAAGIRSSLSKDEEELIQEYFVKQLVEEYTKTKLQKNVVKSIKNQNMVIQPDSDSQVLSLSESRREKQSSAVSSDTLVNCKEKDVLKAFLTDYAVLDEDERNSLLWKLRNLVNLYFYGSESIRDYSYTKEKSVWKEHDEQKANKTLFIDEICHITKIGKNGKEQKVLDYEENRSRCRKQNINYYRSALNYAKNNTSGIFENEDSNHFWIHLIENEVERLYNGIENGEEFKFETGYISEKVWKAVINHLSIKYIALGKAVYNYAMKELSSPGDIEPGKIDDSYINGITSFDYEIIKAEESLQRDISMNVVFATNYLACATVDTDKDFLLFSKEDIRSCTKKDGNLCKNIMQFWGGYSTWKNFCEEYLKDDKDALELLYSLKSMLYSMRNSSFHFSTENVDNGSWDTELIGKLFEEDCNRAARIEKEKFYNNNLHMFYSSSLLEKVLERLYSSHHERASQVPSFNRVFVRKNFPSSLSEQRITPKFTDSKDEQIWQSAVYYLCKEIYYNDFLQSKEAYKLFREGVKNLDKNDINNQKAADSFKQAVVYYGKAIGNATLSQVCQAIMTEYNRQNNDGLKKKSAYAEKQNSNKYKHYPLFLKQVLQSAFWEYLDENKEIYGFISAQIHKSNVEIKAEDFIANYSSQQYKKLVDKVKKTPELQKWYTLGRLINPRQANQFLGSIRNYVQFVKDIQRRAKENGNPIRNYYEVLESDSIIKILEMCTKLNGTTSNDIHDYFRDEDEYAEYISQFVNFGDVHSGAALNAFCNSESEGKKNGIYYDGINPIVNRNWVLCKLYGSPDLISKIISRVNENMIHDFHKQEDLIREYQIKGICSNKKEQQDLRTFQVLKNRVELRDIVEYSEIINELYGQLIKWCYLRERDLMYFQLGFHYLCLNNASSKEADYIKINVDDRNISGAILYQIAAMYINGLPVYYKKDDMYVALKSGKKASDELNSNEQTSKKINYFLKYGNNILGDKKDQLYLAGLELFENVAEHENIIIFRNEIDHFHYFYDRDRSMLDLYSEVFDRFFTYDMKLRKNVVNMLYNILLDHNIVSSFVFETGEKKVGRGDSEVIKPSAKIRLRANNGVSSDVFTYKVGSKDELKIATLPAKNEEFLLNVARLIYYPDMEAVSENMVREGVVKVEKSNDKKGKISRGSNTRSSNQSKYNNKSKNRMNYSMGSIFEKMDLKFD

SEQ ID NO: 1125 - protein, 1437 aa, unknown
  Synthetic sequence
MKISKVREENRGAKLTVNAKTAVVSENRSQEGILYNDPSRYGKSRKNDEDRDRYIESRLKSSGKLYRIFNEDKNKRETDELQWFLSEIVKKINRRNGLVLSDMLSVDDRAFEKAFEKYAELSYTNRRNKVSGSPAFETCGVDAATAERLKGIISETNFINRIKNNIDNKVSEDIIDRIIAKYLKKSLCRERVKRGLKKLLMNAFDLPYSDPDIDVQRDFIDYVLEDFYHVRAKSQVSRSIKNMNMPVQPEGDGKFAITVSKGGTESGNKRSAEKEAFKKFLSDYASLDERVRDDMLRRMRRLVVLYFYGSDDSKLSDVNEKFDVWEDHAARRVDNREFIKLPLENKLANGKTDKDAERIRKNTVKELYRNQNIGCYRQAVKAVEEDNNGRYFDDKMLNMFFIHRIEYGVEKIYANLKQVTEFKARTGYLSEKIWKDLINYISIKYIAMGKAVYNYAMDELNASDKKEIELGKISEEYLSGISSFDYELIKAEEMLQRETAVYVAFAARHLSSQTVELDSENSDFLLLKPKGTMDKNDKNKLASNNILNFLKDKETLRDTILQYFGGHSLWTDFPFDKYLAGGKDDVDFLTDLKDVIYSMRNDSFHYATENHNNGKWNKELISAMFEHETERMTVVMKDKFYSNNLPMFYKNDDLKKLLIDLYKDNVERASQVPSFNKVFVRKNFPALVRDKDNLGIELDLKADADKGENELKFYNALYYMFKEIYYNAFLNDKNVRERFITKATKVADNYDRNKERNLKDRIKSAGSDEKKKLREQLQNYIAENDFGQRIKNIVQVNPDYTLAQICQLIMTEYNQQNNGCMQKKSAARKDINKDSYQHYKMLLLVNLRKAFLEFIKENYAFVLKPYKHDLCDKADFVPDFAKYVKPYAGLISRVAGSSELQKWYIVSRFLSPAQANHMLGFLHSYKQYVWDIYRRASETGTEINHSIAEDKIAGVDITDVDAVIDLSVKLCGTISSEISDYFKDDEVYAEYISSYLDFEYDGGNYKDSLNRFCNSDAVNDQKVALYYDGEHPKLNRNIILSKLYGERRFLEKITDRVSRSDIVEYYKLKKETSQYQTKGIFDSEDEQKNIKKFQEMKNIVEFRDLMDYSEIADELQGQLINWIYLRERDLMNFQLGYHYACLNNDSNKQATYVTLDYQGKKNRKINGAILYQICAMYINGLPLYYVDKDSSEWTVSDGKESTGAKIGEFYRYAKSFENTSDCYASGLEIFENISEHDNITELRNYIEHFRYYSSFDRSFLGIYSEVFDRFFTYDLKYRKNVPTILYNILLQHFVNVRFEFVSGKKMIGIDKKDRKIAKEKECARITIREKNGVYSEQFTYKLKNGTVYVDARDKRYLQSIIRLLFYPEKVNMDEMIEVKEKKKPSDNNTGKGYSKRDRQQDRKEYDKYKEKKKKEGNFLSGMGGNINWDEINAQLKN

SEQ ID NO: 1126 - protein, 1385 aa, Clostridium aminophilum
MKFSKVDHTRSAVGIQKATDSVHGMLYTDPKKQEVNDLDKRFDQLNVKAKRLYNVFNQSKAEEDDDEKRFGKVVKKLNRELKDLLFHREVSRYNSIGNAKYNYYGIKSNPEEIVSNLGMVESLKGERDPQKVISKLLLYYLRKGLKPGTDGLRMILEASCGLRKLSGDEKELKVFLQTLDEDFEKKTFKKNLIRSIENQNMAVQPSNEGDPIIGITQGRFNSQKNEEKSAIERMMSMYADLNEDHREDVLRKLRRLNVLYFNVDTEKTEEPTLPGEVDTNPVFEVWHDHEKGKENDRQFATFAKILTEDRETRKKEKLAVKEALNDLKSAIRDHNIMAYRCSIKVTEQDKDGLFFEDQRINRFWIHHIESAVERILASINPEKLYKLRIGYLGEKVWKDLLNYLSIKYIAVGKAVFHFAMEDLGKTGQDIELGKLSNSVSGGLTSFDYEQIRADETLQRQLSVEVAFAANNLFRAVVGQTGKKIEQSKSEENEEDFLLWKAEKIAESIKKEGEGNTLKSILQFFGGASSWDLNHFCAAYGNESSALGYETKFADDLRKAIYSLRNETFHFTTLNKGSFDWNAKLIGDMFSHEAATGIAVERTRFYSNNLPMFYRESDLKRIMDHLYNTYHPRASQVPSFNSVFVRKNFRLFLSNTLNTNTSFDTEVYQKWESGVYYLFKEIYYNSFLPSGDAHHLFFEGLRRIRKEADNLPIVGKEAKKRNAVQDFGRRCDELKNLSLSAICQMIMTEYNEQNNGNRKVKSTREDKRKPDIFQHYKMLLLRTLQEAFAIYIRREEFKFIFDLPKTLYVMKPVEEFLPNWKSGMFDSLVERVKQSPDLQRWYVLCKFLNGRLLNQLSGVIRSYIQFAGDIQRRAKANHNRLYMDNTQRVEYYSNVLEVVDFCIKGTSRFSNVFSDYFRDEDAYADYLDNYLQFKDEKIAEVSSFAALKTFCNEEEVKAGIYMDGENPVMQRNIVMAKLFGPDEVLKNVVPKVTREEIEEYYQLEKQIAPYRQNGYCKSEEDQKKLLRFQRIKNRVEFQTITEFSEIINELLGQLISWSFLRERDLLYFQLGFHYLCLHNDTEKPAEYKEISREDGTVIRNAILHQVAAMYVGGLPVYTLADKKLAAFEKGEADCKLSISKDTAGAGKKIKDFFRYSKYVLIKDRMLTDQNQKYTIYLAGLELFENTDEHDNITDVRKYVDHFKYYATSDENAMSILDLYSEIHDRFFTYDMKYQKNVANMLENILLRHFVLIRPEFFTGSKKVGEGKKITCKARAQIEIAENGMRSEDFTYKLSDGKKNISTCMIAARDQKYLNTVARLLYYPHEAKKSIVDTREKKNNKKTNRGDGTFNKQKGTARKEKDNGPREFNDTGFSNTPFAGFDPFRNS

SEQ ID NO: 1127 - protein, 1334 aa, unknown
  Synthetic sequence
MKISKVDHTRMAVAKGNQHRRDEISGILYKDPTKTGSIDFDERFKKLNCSAKILYHVFNGIAEGSNKYKNIVDKVNNNLDRVLFTGKSYDRKSIIDIDTVLRNVEKINAFDRISTEEREQIIDDLLEIQLRKGLRKGKAGLREVLLIGAGVIVRTDKKQEIADFLEILDEDFNKTNQAKNIKLSIENQGLVVSPVSRGEERIFDVSGAQKGKSSKKAQEKEALSAFLLDYADLDKNVRFEYLRKIRRLINLYFYVKNDDVMSLTEIPAEVNLEKDFDIWRDHEQRKEENGDFVGCPDILLADRDVKKSNSKQVKIAERQLRESIREKNIKRYRFSIKTIEKDDGTYFFANKQISVFWIHRIENAVERILGSINDKKLYRLRLGYLGEKVWKDILNFLSIKYIAVGKAVFNFAMDDLQEKDRDIEPGKISENAVNGLTSFDYEQIKADEMLQREVAVNVAFAANNLARVTVDIPQNGEKEDILLWNKSDIKKYKKNSKKGILKSILQFFGGASTWNMKMFEIAYHDQPGDYEENYLYDIIQIIYSLRNKSFHFKTYDHGDKNWNRELIGKMIEHDAERVISVEREKFHSNNLPMFYKDADLKKILDLLYSDYAGRASQVPAFNTVLVRKNFPEFLRKDMGYKVHFNNPEVENQWHSAVYYLYKEIYYNLFLRDKEVKNLFYTSLKNIRSEVSDKKQKLASDDFASRCEEIEDRSLPEICQIIMTEYNAQNFGNRKVKSQRVIEKNKDIFRHYKMLLIKTLAGAFSLYLKQERFAFIGKATPIPYETTDVKNFLPEWKSGMYASFVEEIKNNLDLQEWYIVGRFLNGRMLNQLAGSLRSYIQYAEDIERRAAENRNKLFSKPDEKIEACKKAVRVLDLCIKISTRISAEFTDYFDSEDDYADYLEKYLKYQDDAIKELSGSSYAALDHFCNKDDLKFDIYVNAGQKPILQRNIVMAKLFGPDNILSEVMEKVTESAIREYYDYLKKVSGYRVRGKCSTEKEQEDLLKFQRLKNAVEFRDVTEYAEVINELLGQLISWSYLRERDLLYFQLGFHYMCLKNKSFKPAEYVDIRRNNGTIIHNAILYQIVSMYINGLDFYSCDKEGKTLKPIETGKGVGSKIGQFIKYSQYLYNDPSYKLEIYNAGLEVFENIDEHDNITDLRKYVDHFKYYAYGNKMSLLDLYSEFFDRFFTYDMKYQKNVVNVLENILLRHFVIFYPKFGSGKKDVGIRDCKKERAQIEISEQSLTSEDFMFKLDDKAGEEAKKFPARDERYLQTIAKLLYYPNEIEDMNRFMKKGETINKKVQFNRKKKITRKQKNNSSNEVLSSTMGYLFKNIKL

SEQ ID NO: 1128 - protein, 1175 aa, Carnobacterium gallinarum
MRITKVKIKLDNKLYQVTMQKEEKYGTLKLNEESRKSTAEILRLKKASFNKSFHSKTINSQKENKNATIKKNGDYISQIFEKLVGVDTNKNIRKPKMSLTDLKDLPKKDLALFIKRKFKNDDIVEIKNLDLISLFYNALQKVPGEHFTDESWADFCQEMMPYREYKNKFIERKIILLANSIEQNKGFSINPETFSKRKRVLHQWAIEVQERGDFSILDEKLSKLAEIYNFKKMCKRVQDELNDLEKSMKKGKNPEKEKEAYKKQKNFKIKTIWKDYPYKTHIGLIEKIKENEELNQFNIEIGKYFEHYFPIKKERCTEDEPYYLNSETIATTVNYQLKNALISYLMQIGKYKQFGLENQVLDSKKLQEIGIYEGFQTKFMDACVFATSSLKNIIEPMRSGDILGKREFKEAIATSSFVNYHHFFPYFPFELKGMKDRESELIPFGEQTEAKQMQNIWALRGSVQQIRNEIFHSFDKNQKFNLPQLDKSNFEFDASENSTGKSQSYIETDYKFLFEAEKNQLEQFFIERIKSSGALEYYPLKSLEKLFAKKEMKFSLGSQVVAFAPSYKKLVKKGHSYQTATEGTANYLGLSYYNRYELKEESFQAQYYLLKLIYQYVFLPNFSQGNSPAFRETVKAILRINKDEARKKMKKNKKFLRKYAFEQVREMEFKETPDQYMSYLQSEMREEKVRKAEKNDKGFEKNITMNFEKLLMQIFVKGFDVFLTTFAGKELLLSSEEKVIKETEISLSKKINEREKTLKASIQVEHQLVATNSAISYWLFCKLLDSRHLNELRNEMIKFKQSRIKFNHTQHAELIQNLLPIVELTILSNDYDEKNDSQNVDVSAYFEDKSLYETAPYVQTDDRTRVSFRPILKLEKYHTKSLIEALLKDNPQFRVAATDIQEWMHKREEIGELVEKRKNLHTEWAEGQQTLGAEKREEYRDYCKKIDRFNWKANKVTLTYLSQLHYLITDLLGRMVGFSALFERDLVYFSRSFSELGGETYHISDYKNLSGVLRLNAEVKPIKIKNIKVIDNEENPYKGNEPEVKPFLDRLHAYLENVIGIKAVHGKIRNQTAHLSVLQLELSMIESMNNLRDLMAYDRKLKNAVTKSMIKILDKHGMILKLKIDENHKNFEIESLIPKEIIHLKDKAIKTNQVSEEYCQLVLALLTTNPGNQLN

SEQ ID NO: 1129 - protein, 1154 aa, Paludibacter propionicigenes
MRVSKVKVKDGGKDKMVLVHRKTTGAQLVYSGQPVSNETSNILPEKKRQSFDLSTLNKTIIKFDTAKKQKLNVDQYKIVEKIFKYPKQELPKQIKAEEILPFLNHKFQEPVKYWKNGKEESFNLTLLIVEAVQAQDKRKLQPYYDWKTWYIQTKSDLLKKSIENNRIDLTENLSKRKKALLAWETEFTASGSIDLTHYHKVYMTDVLCKMLQDVKPLTDDKGKINTNAYHRGLKKALQNHQPAIFGTREVPNEANRADNQLSIYHLEVVKYLEHYFPIKTSKRRNTADDIAHYLKAQTLKTTIEKQLVNAIRANIIQQGKTNHHELKADTTSNDLIRIKTNEAFVLNLTGTCAFAANNIRNMVDNEQTNDILGKGDFIKSLLKDNTNSQLYSFFFGEGLSTNKAEKETQLWGIRGAVQQIRNNVNHYKKDALKTVFNISNFENPTITDPKQQTNYADTIYKARFINELEKIPEAFAQQLKTGGAVSYYTIENLKSLLTTFQFSLCRSTIPFAPGFKKVFNGGINYQNAKQDESFYELMLEQYLRKENFAEESYNARYFMLKLIYNNLFLPGFTTDRKAFADSVGFVQMQNKKQAEKVNPRKKEAYAFEAVRPMTAADSIADYMAYVQSELMQEQNKKEEKVAEETRINFEKFVLQVFIKGFDSFLRAKEFDFVQMPQPQLTATASNQQKADKLNQLEASITADCKLTPQYAKADDATHIAFYVFCKLLDAAHLSNLRNELIKFRESVNEFKFHHLLEIIEICLLSADVVPTDYRDLYSSEADCLARLRPFIEQGADITNWSDLFVQSDKHSPVIHANIELSVKYGTTKLLEQIINKDTQFKTTEANFTAWNTAQKSIEQLIKQREDHHEQWVKAKNADDKEKQERKREKSNFAQKFIEKHGDDYLDICDYINTYNWLDNKMHFVHLNRLHGLTIELLGRMAGFVALFDRDFQFFDEQQIADEFKLHGFVNLHSIDKKLNEVPTKKIKEIYDIRNKIIQINGNKINESVRANLIQFISSKRNYYNNAFLHVSNDEIKEKQMYDIRNHIAHFNYLTKDAADFSLIDLINELRELLHYDRKLKNAVSKAFIDLFDKHGMILKLKLNADHKLKVESLEPKKIYHLGSSAKDKPEYQYCTNQVMMAYCNMCRSLLEMKK

SEQ ID NO: 1130 - protein, 1120 aa, Listeria seeligeri
MWISIKTLIHHLGVLFFCDYMYNRREKKIIEVKTMRITKVEVDRKKVLISRDKNGGKLVYENEMQDNTEQIMHHKKSSFYKSVVNKTICRPEQKQMKKLVHGLLQENSQEKIKVSDVTKLNISNFLNHRFKKSLYYFPENSPDKSEEYRIEINLSQLLEDSLKKQQGTFICWESFSKDMELYINWAENYISSKTKLIKKSIRNNRIQSTESRSGQLMDRYMKDILNKNKPFDIQSVSEKYQLEKLTSALKATFKEAKKNDKEINYKLKSTLQNHERQIIEELKENSELNQFNIEIRKHLETYFPIKKTNRKVGDIRNLEIGEIQKIVNHRLKNKIVQRILQEGKLASYEIESTVNSNSLQKIKIEEAFALKFINACLFASNNLRNMVYPVCKKDILMIGEFKNSFKEIKHKKFIRQWSQFFSQEITVDDIELASWGLRGAIAPIRNEIIHLKKHSWKKFFNNPTFKVKKSKIINGKTKDVTSEFLYKETLFKDYFYSELDSVPELIINKMESSKILDYYSSDQLNQVFTIPNFELSLLTSAVPFAPSFKRVYLKGFDYQNQDEAQPDYNLKLNIYNEKAFNSEAFQAQYSLFKMVYYQVFLPQFTTNNDLFKSSVDFILTLNKERKGYAKAFQDIRKMNKDEKPSEYMSYIQSQLMLYQKKQEEKEKINHFEKFINQVFIKGFNSFIEKNRLTYICHPTKNTVPENDNIEIPFHTDMDDSNIAFWLMCKLLDAKQLSELRNEMIKFSCSLQSTEEISTFTKAREVIGLALLNGEKGCNDWKELFDDKEAWKKNMSLYVSEELLQSLPYTQEDGQTPVINRSIDLVKKYGTETILEKLFSSSDDYKVSAKDIAKLHEYDVTEKIAQQESLHKQWIEKPGLARDSAWTKKYQNVINDISNYQWAKTKVELTQVRHLHQLTIDLLSRLAGYMSIADRDFQFSSNYILERENSEYRVTSWILLSENKNKNKYNDYELYNLKNASIKVSSKNDPQLKVDLKQLRLTLEYLELFDNRLKEKRNNISHFNYLNGQLGNSILELFDDARDVLSYDRKLKNAVSKSLKEILSSHGMEVTFKPLYQTNHHLKIDKLQPKKIHHLGEKSTVSSNQVSNEYCQLVRTLLTMK

SEQ ID NO: 1131 - protein, 1051 aa, Listeria newyorkensis
MKITKMRVDGRTIVMERTSKEGQLGYEGIDGNKTTEIIFDKKKESFYKSILNKTVRKPDEKEKNRRKQAINKAINKEITELMLAVLHQEVPSQKLHNLKSLNTESLTKLFKPKFQNMISYPPSKGAEHVQFCLTDIAVPAIRDLDEIKPDWGIFFEKLKPYTDWAESYIHYKQTTIQKSIEQNKIQSPDSPRKLVLQKYVTAFLNGEPLGLDLVAKKYKLADLAESFKLVDLNEDKSANYKIKACLQQHQRNILDELKEDPELNQYGIEVKKYIQRYFPIKRAPNRSKHARADFLKKELIESTVEQQFKNAVYHYVLEQGKMEAYELTDPKTKDLQDIRSGEAFSFKFINACAFASNNLKMILNPECEKDILGKGNFKKNLPNSTTRSDVVKKMIPFFSDELQNVNFDEAIWAIRGSIQQIRNEVYHCKKHSWKSILKIKGFEFEPNNMKYADSDMQKLMDKDIAKIPEFIEEKLKSSGVVRFYRHDELQSIWEMKQGFSLLTTNAPFVPSFKRVYAKGHDYQTSKNRYYNLDLTTFDILEYGEEDFRARYFLTKLVYYQQFMPWFTADNNAFRDAANFVLRLNKNRQQDAKAFINIREVEEGEMPRDYMGYVQGQIAIHEDSIEDTPNHFEKFISQVFIKGFDRHMRSANLKFIKNPRNQGLEQSEIEEMSFDIKVEPSFLKNKDDYIAFWIFCKMLDARHLSELRNEMIKYDGHLTGEQEIIGLALLGVDSRENDWKQFFSSEREYEKIMKGYVVEELYQREPYRQSDGKTPILFRGVEQARKYGTETVIQRLFDANPEFKVSKCNLAEWERQKETIEETIKRRKELHNEWAKNPKKPQNNAFFKEYKECCDAIDAYNWHKNKTTLAYVNELHHLLIEILGRYVGYVAIADRDFQCMANQYFKHSGITERVEYWGDNRLKSIKKLDTFLKKEGLFVSEKNARNHIAHLNYLSLKSECTLLYLSERLREIFKYDRKLKNAVSKSLIDILDRHGMSVVFANLKENKHRLVIKSLEPKKLRHLGGKKIDGGYIETNQVSEEYCGIVKRLLEM

SEQ ID NO: 1132 - protein, 1182 aa, Leptotrichia wadei
MYMKITKIDGVSHYKKQDKGILKKKWKDLDERKQREKIEARYNKQIESKIYKEFFRLKNKKRIEKEEDQNIKSLYFFIKELYLNEKNEEWELKNINLEILDDKERVIKGYKFKEDVYFFKEGYKEYYLRILFNNLIEKVQNENREKVRKNKEFLDLKEIFKKYKNRKIDLLLKSINNNKINLEYKKENVNEEIYGINPTNDREMTFYELLKEIIEKKDEQKSILEEKLDNFDITNFLENIEKIFNEETEINIIKGKVLNELREYIKEKEENNSDNKLKQIYNLELKKYIENNFSYKKQKSKSKNGKNDYLYLNFLKKIMFIEEVDEKKEINKEKFKNKINSNFKNLFVQHILDYGKLLYYKENDEYIKNTGQLETKDLEYIKTKETLIRKMAVLVSFAANSYYNLFGRVSGDILGTEVVKSSKTNVIKVGSHIFKEKMLNYFFDFEIFDANKIVEILESISYSIYNVRNGVGHFNKLILGKYKKKDINTNKRIEEDLNNNEEIKGYFIKKRGEIERKVKEKFLSNNLQYYYSKEKIENYFEVYEFEILKRKIPFAPNFKRIIKKGEDLFNNKNNKKYEYFKNFDKNSAEEKKEFLKTRNFLLKELYYNNFYKEFLSKKEEFEKIVLEVKEEKKSRGNINNKKSGVSFQSIDDYDTKINISDYIASIHKKEMERVEKYNEEKQKDTAKYIRDFVEEIFLTGFINYLEKDKRLHFLKEEFSILCNNNNNVVDFNININEEKIKEFLKENDSKTLNLYLFFNMIDSKRISEFRNELVKYKQFTKKRLDEEKEFLGIKIELYETLIEFVILTREKLDTKKSEEIDAWLVDKLYVKDSNEYKEYEEILKLFVDEKILSSKEAPYYATDNKTPILLSNFEKTRKYGTQSFLSEIQSNYKYSKVEKENIEDYNKKEEIEQKKKSNIEKLQDLKVELHKKWEQNKITEKEIEKYNNTTRKINEYNYLKNKEELQNVYLLHEMLSDLLARNVAFFNKWERDFKFIVIAIKQFLRENDKEKVNEFLNPPDNSKGKKVYFSVSKYKNTVENIDGIHKNFMNLIFLNNKFMNRKIDKMNCAIWVYFRNYIAHFLHLHTKNEKISLISQMNLLIKLFSYDKKVQNHILKSTKTLLEKYNIQINFEISNDKNEVFKYKIKNRLYSKKGKMLGKNNKFEILENEFLENVKAMLEYSE

SEQ ID NO: 1133 - protein, 1285 aa, Rhodobacter capsulatus
MQIGKVQGRTISEFGDPAGGLKRKISTDGKNRKELPAHLSSDPKALIGQWISGIDKIYRKPDSRKSDGKAIHSPTPSKMQFDARDDLGEAFWKLVSEAGLAQDSDYDQFKRRLHPYGDKFQPADSGAKLKFEADPPEPQAFHGRWYGAMSKRGNDAKELAAALYEHLHVDEKRIDGQPKRNPKTDKFAPGLVVARALGIESSVLPRGMARLARNWGEEEIQTYFVVDVAASVKEVAKAAVSAAQAFDPPRQVSGRSLSPKVGFALAEHLERVTGSKRCSFDPAAGPSVLALHDEVKKTYKRLCARGKNAARAFPADKTELLALMRHTHENRVRNQMVRMGRVSEYRGQQAGDLAQSHYWTSAGQTEIKESEIFVRLWVGAFALAGRSMKAWIDPMGKIVNTEKNDRDLTAAVNIRQVISNKEMVAEAMARRGIYFGETPELDRLGAEGNEGFVFALLRYLRGCRNQTFHLGARAGFLKEIRKELEKTRWGKAKEAEHVVLTDKTVAAIRAIIDNDAKALGARLLADLSGAFVAHYASKEHFSTLYSEIVKAVKDAPEVSSGLPRLKLLLKRADGVRGYVHGLRDTRKHAFATKLPPPPAPRELDDPATKARYIALLRLYDGPFRAYASGITGTALAGPAARAKEAATALAQSVNVTKAYSDVMEGRSSRLRPPNDGETLREYLSALTGETATEFRVQIGYESDSENARKQAEFIENYRRDMLAFMFEDYIRAKGFDWILKIEPGATAMTRAPVLPEPIDTRGQYEHWQAALYLVMHFVPASDVSNLLHQLRKWEALQGKYELVQDGDATDQADARREALDLVKRFRDVLVLFLKTGEARFEGRAAPFDLKPFRALFANPATFDRLFMATPTTARPAEDDPEGDGASEPELRVARTLRGLRQIARYNHMAVLSDLFAKHKVRDEEVARLAEIEDETQEKSQIVAAQELRTDLHDKVMKCHPKTISPEERQSYAAAIKTIEEHRFLVGRVYLGDHLRLHRLMMDVIGRLIDYAGAYERDTGTFLINASKQLGAGADWAVTIAGAANTDARTQTRKDLAHFNVLDRADGTPDLTALVNRAREMMAYDRKRKNAVPRSILDMLARLGLTLKWQMKDHLLQDATITQAAIKHLDKVRLTVGGPAAVTEARFSQDYLQMVAAVFNGSVQNPKPRRRDDGDAWHKPPKPATAQSQPDQKPPNKAPSAGSRLPPPQVGEVYEGVVVKVIDTGSLGFLAVEGVAGNIGLHISRLRRIREDAIIVGRRYRFRVEIYVPPKSNTSKLNAADLVRID

SEQ ID NO: 1134 - protein, 1159 aa, Leptotrichia buccalis
MKVTKVGGISHKKYTSEGRLVKSESEENRTDERLSALLNMRLDMYIKNPSSTETKENQKRIGKLKKFFSNKMVYLKDNTLSLKNGKKENIDREYSETDILESDVRDKKNFAVLKKIYLNENVNSEELEVFRNDIKKKLNKINSLKYSFEKNKANYQKINENNIEKVEGKSKRNIIYDYYRESAKRDAYVSNVKEAFDKLYKEEDIAKLVLEIENLTKLEKYKIREFYHEIIGRKNDKENFAKIIYEEIQNVNNMKELIEKVPDMSELKKSQVFYKYYLDKEELNDKNIKYAFCHFVEIEMSQLLKNYVYKRLSNISNDKIKRIFEYQNLKKLIENKLLNKLDTYVRNCGKYNYYLQDGEIATSDFIARNRQNEAFLRNIIGVSSVAYFSLRNILETENENDITGRMRGKTVKNNKGEEKYVSGEVDKIYNENKKNEVKENLKMFYSYDFNMDNKNEIEDFFANIDEAISSIRHGIVHFNLELEGKDIFAFKNIAPSEISKKMFQNEINEKKLKLKIFRQLNSANVFRYLEKYKILNYLKRTRFEFVNKNIPFVPSFTKLYSRIDDLKNSLGIYWKTPKTNDDNKTKEIIDAQIYLLKNIYYGEFLNYFMSNNGNFFEISKEIIELNKNDKRNLKTGFYKLQKFEDIQEKIPKEYLANIQSLYMINAGNQDEEEKDTYIDFIQKIFLKGFMTYLANNGRLSLIYIGSDEETNTSLAEKKQEFDKFLKKYEQNNNIKIPYEINEFLREIKLGNILKYTERLNMFYLILKLLNHKELTNLKGSLEKYQSANKEEAFSDQLELINLLNLDNNRVTEDFELEADEIGKFLDFNGNKVKDNKELKKFDTNKIYFDGENIIKHRAFYNIKKYGMLNLLEKIADKAGYKISIEELKKYSNKKNEIEKNHKMQENLHRKYARPRKDEKFTDEDYESYKQAIENIEEYTHLKNKVEFNELNLLQGLLLRILHRLVGYTSIWERDLRFRLKGEFPENQYIEEIFNFENKKNVKYKGGQIVEKYIKFYKELHQNDEVKINKYSSANIKVLKQEKKDLYIRNYIAHFNYIPHAEISLLEVLENLRKLLSYDRKLKNAVMKSVVDILKEYGFVATFKIGADKKIGIQTLESEKIVHLKNLKKKKLMTDRNSEELCKLVKIMFEYKMEEKKSEN

SEQ ID NO: 1135 - protein, 1389 aa, Leptotrichia shahii
MGNLFGHKRWYEVRDKKDFKIKRKVKVKRNYDGNKYILNINENNNKEKIDNNKFIRKYINYKKNDNILKEFTRKFHAGNILFKLKGKEGIIRIENNDDFLETEEVVLYIEAYGKSEKLKALGITKKKIIDEAIRQGITKDDKKIEIKRQENEEEIEIDIRDEYTNKTLNDCSIILRIIENDELETKKSIYEIFKNINMSLYKIIEKIIENETEKVFENRYYEEHLREKLLKDDKIDVILTNFMEIREKIKSNLEILGFVKFYLNVGGDKKKSKNKKMLVEKILNINVDLTVEDIADFVIKELEFWNITKRIEKVKKVNNEFLEKRRNRTYIKSYVLLDKHEKFKIERENKKDKIVKFFVENIKNNSIKEKIEKILAEFKIDELIKKLEKELKKGNCDTEIFGIFKKHYKVNFDSKKFSKKSDEEKELYKIIYRYLKGRIEKILVNEQKVRLKKMEKIEIEKILNESILSEKILKRVKQYTLEHIMYLGKLRHNDIDMTTVNTDDFSRLHAKEELDLELITFFASTNMELNKIFSRENINNDENIDFFGGDREKNYVLDKKILNSKIKIIRDLDFIDNKNNITNNFIRKFTKIGTNERNRILHAISKERDLQGTQDDYNKVINIIQNLKISDEEVSKALNLDVVFKDKKNIITKINDIKISEENNNDIKYLPSFSKVLPEILNLYRNNPKNEPFDTIETEKIVLNALIYVNKELYKKLILEDDLEENESKNIFLQELKKTLGNIDEIDENIIENYYKNAQISASKGNNKAIKKYQKKVIECYIGYLRKNYEELFDFSDFKMNIQEIKKQIKDINDNKTYERITVKTSDKTIVINDDFEYIISIFALLNSNAVINKIRNRFFATSVWLNTSEYQNIIDILDEIMQLNTLRNECITENWNLNLEEFIQKMKEIEKDFDDFKIQTKKEIFNNYYEDIKNNILTEFKDDINGCDVLEKKLEKIVIFDDETKFEIDKKSNILQDEQRKLSNINKKDLKKKVDQYIKDKDQEIKSKILCRIIFNSDFLKKYKKEIDNLIEDMESENENKFQEIYYPKERKNELYIYKKNLFLNIGNPNFDKIYGLISNDIKMADAKFLFNIDGKNIRKNKISEIDAILKNLNDKLNGYSKEYKEKYIKKLKENDDFFAKNIQNKNYKSFEKDYNRVSEYKKIRDLVEFNYLNKIESYLIDINWKLAIQMARFERDMHYIVNGLRELGIIKLSGYNTGISRAYPKRNGSDGFYTTTAYYKFFDEESYKKFEKICYGFGIDLSENSEINKPENESIRNYISHFYIVRNPFADYSIAEQIDRVSNLLSYSTRYNNSTYASVFEVFKKDVNLDYDELKKKFKLIGNNDILERLMKPKKVSVLELESYNSDYIKNLIIELLTKIENTNDTL

SEQ ID NO: 1136 - protein, 4 aa, Artificial Sequence
  Synthetic sequence
AAAA

SEQ ID NO: 1137 - protein, 4 aa, Artificial Sequence
  Synthetic sequence
AAAA

SEQ ID NO: 1138 - protein, 4 aa, Artificial Sequence
  Synthetic sequence
AAAA

SEQ ID NO: 1139 - protein, 4 aa, Artificial Sequence
  Synthetic sequence
AAAA

SEQ ID NO: 1140 - protein, 1056 aa, Staphylococcus aureus
GSHMKRNYILGLDIGITSVGYGIIDYETRDVIDAGVRLFKEANVENNEGRRSKRGARRLKRRRRHRIQRVKKLLFDYNLLTDHSELSGINPYEARVKGLSQKLSEEEFSAALLHLAKRRGVHNVNEVEEDTGNELSTKEQISRNSKALEEKYVAELQLERLKKDGEVRGSINRFKTSDYVKEAKQLLKVQKAYHQLDQSFIDTYIDLLETRRTYYEGPGEGSPFGWKDIKEWYEMLMGHCTYFPEELRSVKYAYNADLYNALNDLNNLVITRDENEKLEYYEKFQIIENVFKQKKKPTLKQIAKEILVNEEDIKGYRVTSTGKPEFTNLKVYHDIKDITARKEIIENAELLDQIAKILTIYQSSEDIQEELTNLNSELTQEEIEQISNLKGYTGTHNLSLKAINLILDELWHTNDNQIAIFNRLKLVPKKVDLSQQKEIPTTLVDDFILSPVVKRSFIQSIKVINAIIKKYGLPNDIIIELAREKNSKDAQKMINEMQKRNRQTNERIEEIIRTTGKENAKYLIEKIKLHDMQEGKCLYSLEAIPLEDLLNNPFNYEVDHIIPRSVSFDNSFNNKVLVKQEEASKKGNRTPFQYLSSSDSKISYETFKKHILNLAKGKGRISKTKKEYLLEERDINRFSVQKDFINRNLVDTRYATRGLMNLLRSYFRVNNLDVKVKSINGGFTSFLRRKWKFKKERNKGYKHHAEDALIIANADFIFKEWKKLDKAKKVMENQMFEEKQAESMPEIETEQEYKEIFITPHQIKHIKDFKDYKYSHRVDKKPNRELINDTLYSTRKDDKGNTLIVNNLNGLYDKDNDKLKKLINKSPEKLLMYHHDPQTYQKLKLIMEQYGDEKNPLYKYYEETGNYLTKYSKKDNGPVIKKIKYYGNKLNAHLDITDDYPNSRNKVVKLSLKPYRFDVYLDNGVYKFVTVKNLDVIKKENYYEVNSKAYEEAKKLKKISNQAEFIASFYNNDLIKINGELYRVIGVNNDLLNRIEVNMIDITYREYLENMNDKRPPRIIKTIASKTQSIKKYSTDILGNLYEVKSKKHPQIIKKG

SEQ ID NO: 1141 - protein, 1368 aa, Streptococcus pyogenes
MDKKYSIGLDIGTNSVGWAVITDDYKVPSKKFKVLGNTDRHSIKKNLIGALLFDSGETAEATRLKRTARRRYTRRKNRICYLQEIFSNEMAKVDDSFFHRLEESFLVEEDKKHERHPIFGNIVDEVAYHEKYPTIYHLRKKLVDSTDKADLRLIYLALAHMIKFRGHFLIEGDLNPDNSDVDKLFIQLVQTYNQLFEENPINASGVDAKAILSARLSKSRRLENLIAQLPGEKKNGLFGNLIALSLGLTPNFKSNFDLAEDAKLQLSKDTYDDDLDNLLAQIGDQYADLFLAAKNLSDAILLSDILRVNTEITKASLSASMIKRYDEHHQDLTLLKALVRQQLPEKYKEIFFDQSKNGYAGYIDGGASQEEFYKFIKPILEKMDGTEELLVKLNREDLLRKQRTFDNGSIPHQIHLGELHAILRRQEDFYPFLKDNREKIEKILTFRIPYYVGPLARGNSRFAWMTRKSEETITPWNFEEVVDKGASAQSFIERMTNFDKNLPNEKVLPKHSLLYEYFTVYNELTKVKYVTEGMRKPAFLSGEQKKAIVDLLFKTNRKVTVKQLKEDYFKKIECFDSVEISGVEDRFNASLGTYHDLLKIIKDKDFLDNEENEDILEDIVLTLTLFEDREMIEERLKTYAHLFDDKVMKQLKRRRYTGWGRLSRKLINGIRDKQSGKTILDFLKSDGFANRNFMQLIHDDSLTFKEDLQKAQVSGQGDSLHEHIANLAGSPAIKKGILQTVKVVDELVKVMGRHKPENIVIEMARENQTTQKGQKNSRERMKRIEEGIKELGSDILKEYPVENTQLQNEKLYLYYLQNGRDMYVDQELDINRLSDYDVDHIVPQSFIKDDSIDNKVLTRSDKNRGKSDNVPSEEVVKKMKNYWRQLLNAKLITQRKFDNLTKAERGGLSELDKAGFIKRQLVETRQITKHVAQILDSRMNTKYDENDKLIREVKVITLKSKLVSDFRKDFQFYKVREINNYHHAHDAYLNAVVGTALIKKYPKLESEFVYGDYKVYDVRKMIAKSEQEIGKATAKYFFYSNIMNFFKTEITLANGEIRKRPLIETNGETGEIVWDKGRDFATVRKVLSMPQVNIVKKTEVQTGGFSKESILPKRNSDKLIARKKDWDPKKYGGFDSPTVAYSVLVVAKVEKGKSKKLKSVKELLGITIMERSSFEKNPIDFLEAKGYKEVRKDLIIKLPKYSLFELENGRKRMLASAGELQKGNELALPSKYVNFLYLASHYEKLKGSPEDNEQKQLFVEQHKHYLDEIIEQISEFSKRVILADANLDKVLSAYNKHRDKPIREQAENIIHLFTLTNLGAPAAFKYFDTTIGRNRYKSIKEVLDATLIHQSITGLYETRIDLSQLGGD

SEQ ID NO: 1142 - protein, 1368 aa, Artificial Sequence
  Synthetic sequence
MDKKYSIGLDIGTNSVGWAVITDDYKVPSKKFKVLGNTDRHSIKKNLIGALLFDSGETAEATRLKRTARRRYTRRKNRICYLQEIFSNEMAKVDDSFFHRLEESFLVEEDKKHERHPIFGNIVDEVAYHEKYPTIYHLRKKLVDSTDKADLRLIYLALAHMIKFRGHFLIEGDLNPDNSDVDKLFIQLVQTYNQLFEENPINASGVDAKAILSARLSKSRRLENLIAQLPGEKKNGLFGNLIALSLGLTPNFKSNFDLAEDAKLQLSKDTYDDDLDNLLAQIGDQYADLFLAAKNLSDAILLSDILRVNTEITKASLSASMIKRYDEHHQDLTLLKALVRQQLPEKYKEIFFDQSKNGYAGYIDGGASQEEFYKFIKPILEKMDGTEELLVKLNREDLLRKQRTFDNGSIPHQIHLGELHAILRRQEDFYPFLKDNREKIEKILTFRIPYYVGPLARGNSRFAWMTRKSEETITPWNFEEVVDKGASAQSFIERMTAFDKNLPNEKVLPKHSLLYEYFTVYNELTKVKYVTEGMRKPAFLSGEQKKAIVDLLFKTNRKVTVKQLKEDYFKKIECFDSVEISGVEDRFNASLGTYHDLLKIIKDKDFLDNEENEDILEDIVLTLTLFEDREMIEERLKTYAHLFDDKVMKQLKRRRYTGWGALSRKLINGIRDKQSGKTILDFLKSDGFANRNFMALIHDDSLTFKEDLQKAQVSGQGDSLHEHIANLAGSPAIKKGILQTVKVVDELVKVMGRHKPENIVIEMARENQTTQKGQKNSRERMKRIEEGIKELGSDILKEYPVENTQLQNEKLYLYYLQNGRDMYVDQELDINRLSDYDVDHIVPQSFIKDDSIDNKVLTRSDKNRGKSDNVPSEEVVKKMKNYWRQLLNAKLITQRKFDNLTKAERGGLSELDKAGFIKRQLVETRAITKHVAQILDSRMNTKYDENDKLIREVKVITLKSKLVSDFRKDFQFYKVREINNYHHAHDAYLNAVVGTALIKKYPKLESEFVYGDYKVYDVRKMIAKSEQEIGKATAKYFFYSNIMNFFKTEITLANGEIRKRPLIETNGETGEIVWDKGRDFATVRKVLSMPQVNIVKKTEVQTGGFSKESILPKRNSDKLIARKKDWDPKKYGGFDSPTVAYSVLVVAKVEKGKSKKLKSVKELLGITIMERSSFEKNPIDFLEAKGYKEVRKDLIIKLPKYSLFELENGRKRMLASAGELQKGNELALPSKYVNFLYLASHYEKLKGSPEDNEQKQLFVEQHKHYLDEIIEQISEFSKRVILADANLDKVLSAYNKHRDKPIREQAENIIHLFTLTNLGAPAAFKYFDTTIGRNRYKSIKEVLDATLIHQSITGLYETRIDLSQLGGD

SEQ ID NO: 1143 - DNA, 82 bp, Artificial Sequence
  Synthetic sequence
aaaaaagcaccgactcggtgccactttttcaagttgataacggactagccttattttaacttgctatttctagctctaaaac

SEQ ID NO: 1144 - DNA, 24 bp, Artificial Sequence
  Synthetic sequence
ggatcctaatacgactcactatag

SEQ ID NO: 1145 - DNA, 18 bp, Artificial Sequence
  Synthetic sequence
aaaaaagcaccgactcgg

SEQ ID NO: 1146 - DNA, 20 bp, Artificial Sequence
  Synthetic sequence
gggtggatgaccgtgagtcc

SEQ ID NO: 1147 - DNA, 20 bp, Artificial Sequence
  Synthetic sequence
tatgactggagtcccgggcg

SEQ ID NO: 1148 - DNA, 20 bp, Artificial Sequence
  Synthetic sequence
agacagaaacaccttcagaa

SEQ ID NO: 1149 - DNA, 20 bp, Artificial Sequence
  Synthetic sequence
cgtggaattataccagccag

SEQ ID NO: 1150 - DNA, 20 bp, Artificial Sequence
  Synthetic sequence
aggagtgaggtctagtactt

SEQ ID NO: 1151 - DNA, 20 bp, Artificial Sequence
  Synthetic sequence
cccaaggatacagtatccta

SEQ ID NO: 1152 - DNA, 92 bp, Artificial Sequence
  Synthetic sequence
gtgcaccatctggacctcagttccccttcaaaggggtggatgaccgtgaattcctggccctctgtgttttataataggacctgccagtgctc

SEQ ID NO: 1153 - DNA, 160 bp, Artificial Sequence
  Synthetic sequence
ccagcaacctaaagctgttaagaaatctttgggccccagcttgacccaaggatacagtatgctagcataacttcgtataatgtatgctatacgaagttatcctagggaagttaccaaaatcagagatagtatgcagcagccaggggtctcatgtgtggca

SEQ ID NO: 1154 - DNA, 160 bp, Artificial Sequence
  Synthetic sequence
ccactcctctgtactccctggcttttccacaatccttaaactgaaggagtgaggtctagtataacttcgtatagcatacattatacgaagttatgaattcacttgggggtcattgggctagactgaatatctttggttggtacccagacctaatccacca
